(19) United States
(12) Patent Application Publication
(10) Pub. No.: US 2009/0215872 A1
(43) Pub. Date: Aug. 27, 2009

(54) Methods for Controlling Stem Cell Differentiation

(76) Inventor: Jeannie T. Lee, Weston, MA (US)

Correspondence Address: CLARK & ELBING LLP, 101 FEDERAL STREET, BOSTON, MA, 02110, US

(21) Appl. No.: 11/988,321

(22) PCT Filed: Jun. 30, 2006
(86) PCT No.: PCT/US2006/025800

§ 371 Date: Mar. 23, 2009

Related U.S. Application Data
(60) Provisional application No. 60/697,301, filed on Jul. 7, 2005.

(51) Int. Cl. C12N 15/09; C12N 5/10; C07H 21/02; A61K 31/7088; C12N 15/63; A61P 43/00

(52) U.S. Cl. 514/44 R; 435/377; 435/366; 536/23.1; 435/320.1

(57) ABSTRACT

Disclosed herein are methods for controlling stem cell differentiation through the introduction of transgenes having Xic, Tsix, or Xite sequences to block differentiation and the removal of the transgenes to allow differentiation. Also disclosed are small RNA molecules and methods for using the small RNA molecules to control stem cell differentiation. Also disclosed are stem cells genetically modified by the introduction of Xic, Tsix, or Xite sequences.

### STATEMENT AS TO FEDERALLY SPONSORED RESEARCH

[0001] This invention was funded in part by grant number RO1 GM58839 from the National Institutes of Health. The government may have certain rights in the invention.

### BACKGROUND OF THE INVENTION

[0002] The present invention features improvements for the development and maintenance of mammalian stem cells and their derivatives.

[0003] Stem cells are unique cell populations that have the ability to divide (self-renew) for indefinite periods of time, and, under the right conditions or signals, to differentiate into the many different cell types that make up an organism. Stem cells derived from the inner cell mass of the blastocyst are known as embryonic stem (ES) cells. Stem cells derived from the primordial germ cells, and which normally develop into mature gametes (eggs and sperm) are known as embryonic germ (EG) cells. Both of these types of stem cells are known as pluripotent cells because of their unique ability to differentiate into derivatives of all three embryonic germ layers (endoderm, mesoderm, and ectoderm).

[0004] The pluripotent stem cells can further specialize into another type of multipotent stem cell often derived from adult tissues. Multipotent stem cells are also able to undergo self-renewal and differentiation, but unlike embryonic stem cells, are committed to give rise to cells that have a particular function. Examples of adult stem cells include hematopoietic stem cells (HSC), which can proliferate and differentiate to produce lymphoid and myeloid cell types, bone marrow-derived stem cells (BMSC), which can differentiate into adipocytes, chondrocytes, osteocytes, hepatocytes, cardiomyocytes and neurons, and neural stem cells (NSC), which can differentiate into astrocytes, neurons, and oligodendrocytes. Multipotent stem cells have also been derived from epithelial and adipose tissues and umbilical cord blood (UCB).

[0005] A considerable amount of interest has been generated in the fields of regenerative medicine and gene therapy by recent work relating to the isolation and propagation of stem cells. The ability of stem cells to be propagated indefinitely in culture combined with their ability to generate a variety of tissue types makes the therapeutic potential from these cells almost limitless.

[0006] One of the major limitations in the development of stem cells for therapeutic purposes concerns the regulation of the transition from self-renewal to differentiation for a sufficient time to allow the clinician or researcher to manipulate the cells for therapeutic or research purposes. Current methods used for maintaining stem cells in the undifferentiated state include growing the cells on a feeder layer of mouse embryonic fibroblast cells, culturing in bovine serum, culturing in a plate-coating matrix of cells extracted from mouse tumors, and adding reagents such as leukemia inhibitory factor, fibroblast growth factor (FGF), the Map kinase kinase inhibitor PD 98059, and Oct-4 (also known as Oct-3/4). All of these methods are limited in their potential because of their inefficiency in blocking differentiation and because of the potential contamination with animal products, pathogens, feeder cells, or, in the case of human stem cells, contamination with non-human cells.

[0007] Improved methods for the growth and manipulation of undifferentiated stem cells are needed to help realize the full therapeutic potential of these cells.

### SUMMARY OF THE INVENTION

[0008] The present invention is based on the discovery that X-chromosome inactivation (XCI) enables differentiation in stem cells and that inhibiting or blocking XCI can result in a block to differentiation, thereby providing a mechanism for controlling differentiation of stem cells. Such methods include targeting and inactivating any of the endogenous genes within the X-inactivation center locus or introducing transgenes that can prevent the cells from undergoing X chromosome inactivation. The use of these methods to control stem cell differentiation facilitates and enhances the therapeutic and clinical potential of stem cells.

[0009] XCI is the process in which one X-chromosome is shut off in the female cell (XX) to compensate for having an extra X-chromosome as compared to the male (XY) cell. This means that every embryo must be equipped with a mechanism to count X-chromosomes (XX vs. XY), and then randomly choose between two X-chromosomes in the female to start the inactivation process while maintaining the same X-chromosome inactive in all later divisions. The steps are respectively known as “counting,” “choice,” and “silencing.” In addition, interchromosomal pairing is also involved in the XCI process.

[0010] These steps are controlled by a master regulatory region called the X-inactivation center (Xic), which contains a number of unusual noncoding genes that work together to ensure that XCI takes place only in the XX female, only on one chromosome, and in a developmentally specific manner. At the Xic, three noncoding genes, Xist, Tsix, and Xite, are involved in this process and each makes RNA instead of protein. Xist is made only from the future inactive X and makes a 20 kb RNA that “coats” the inactive X, thereby initiating the process of gene silencing. Tsix is the antisense regulator of Xist and acts by preventing the spread of Xist RNA along the X-chromosome. Thus, Tsix designates the future active X. Xite works together with Tsix to ensure the active state of the X. Xite makes a series of intergenic RNAs and assumes special chromatin conformation. Its action enhances the expression of antisense Tsix, thereby synergizing with Tsix to designate the future active X. Together Tsix and Xite control the “choice” step, while Xist controls the “silencing” step. Tsix and Xite also regulate counting and mutually exclusive choice through X-X pairing.

[0011] The present invention is based on the discovery that disruptions in the XCI process, either by an excess or a depletion of Xic, Tsix, and Xite, can block differentiation. In the present methods, disruptions in the XCI process are achieved through the use of transgenes or small RNAs derived from Xic, Tsix or Xite sequences, or fragments thereof, that are introduced into stem cells and prevent the stem cells from undergoing X chromosome inactivation and from differentiating in culture. Removal of the transgene reverses the block to differentiation and the stem cells can be induced to differentiate as desired. These methods allow the clinician or investigator sufficient time to manipulate the stem cells as needed to enhance their therapeutic potential in the absence of contamination with cells or animal products. The use of small RNA molecules circumvents the need for removal of the transgene because the small RNA molecules have a limited half-life and will naturally degrade. The methods of the invention also reduce or eliminate the need to use feeder cells which also results in cells that are more suitable for therapeutic purposes due to the reduced likelihood of contamination by feeder cells. Thus, these methods and the cells produced from these methods overcome two of the major limitations to stem cell research.

[0012] Accordingly, in a first aspect the invention features a method for delaying differentiation of a stem cell that includes introducing into the stem cell at least one transgene selected from the group consisting of an Xic transgene, a Tsix transgene, an Xite transgene, a Tsix/Xite transgene, and any fragments thereof.

[0013] In another aspect, the invention features a method of controlling differentiation of a stem cell that includes the steps of (a) introducing into the stem cell at least one transgene selected from the group consisting of an Xic transgene, a Tsix transgene, an Xite transgene, a Tsix/Xite transgene, and fragments thereof, thereby delaying differentiation of the stem cell and (b) when desired, inactivating the transgene thereby allowing differentiation of the stem cell. In this method the transgene can further include a selectable marker. The transgene can also be flanked by recombinase recognition sequences including but not limited to LoxP or FRT sequences. In step (b) of the method, inactivating the transgene can include removing the transgene from the stem cell, for example by expression of a recombinase (e.g., Cre recombinase or flippase (FLP) recombinase) in the stem cell to remove the transgene from the genomic DNA or to remove an episome containing the transgene (e.g., by deleting the origin of replication). In preferred embodiments, the recombinase expression is transient. The method can also include the introduction of a second transgene into the stem cell prior to the inactivation step. If desired, more than one additional transgene can be introduced into the stem cell prior to the inactivation step.

[0014] In another aspect, the invention features a method for delaying differentiation of a stem cell that includes introducing into the stem cell a small RNA substantially identical to or complementary to at least 15 nucleotides of a transgene selected from the group consisting of an Xic transgene, a Tsix transgene, an Xite transgene, a Tsix/Xite transgene, an Xist transgene, and any fragments thereof. The small RNA molecule can be a double stranded RNA or an siRNA molecule. The small RNA is at least 15 nucleotides, preferably, 17, 18, 19, 20, 21, 22, 23, 24, 25, 26, 27, 28, 29, 30, 31, 32, 33, 34, or 35, nucleotides in length and even up to 50 or 100 nucleotides in length (inclusive of all integers in between). Desirably, the small RNA molecule is 15 to 32 nucleotides in length.

[0015] For any of the above aspects, preferred Xic transgenes include any nucleic acid sequence substantially identical to SEQ ID NOs: 1, 2, 3, 39, or any fragments thereof. Preferred Tsix transgenes include any nucleic acid sequence substantially identical to SEQ ID NOs: 5, 6, 9, 10, 12, 13, 14, 21, 22, 23, 28, 29, 30, 31, 32, 36, 40, or any fragments thereof. Particularly preferred Tsix transgenes include the nucleic acid sequences set forth in SEQ ID NOs: 9, 10, 12, 21, 22 and 28-32. Additional preferred Tsix transgenes include at least one copy, at least two copies, at least three copies, at least four copies, and at least five copies of any of SEQ ID NOs: 13, 14, 28-32, or 40. Preferred Xite transgenes include any nucleic acid sequence substantially identical to SEQ ID NOs: 15, 16, 17, 24, 25, 26, 27, 38, or any fragments thereof. Preferred Tsix/Xite transgenes include any nucleic acid sequence substantially identical to SEQ ID NOs: 4, 11, 19, 37, or any fragments thereof. Preferred transgenes for any of the above regions can inhibit endogenous X-X pairing, for example, by inducing de novo pairing between the X and the transgene, as assayed using the methods described herein.

[0016] Any of the transgenes can be used in combination with any additional transgene. In one example, SEQ ID NO: 23 can be used in combination with any of the additional transgenes to enhance the block to differentiation. In addition, the transgenes can be used as a single copy or as a multimer (e.g., multiple copies or a tandem array of the sequence). For example, SEQ ID NOs: 13, 14, 28-32, and 40 are particularly useful as multimers.

[0017] In preferred embodiments of the above aspects, the stem cell is an embryonic stem cell, desirably a female embryonic stem cell. Mammalian embryonic stem cells or embryonic stem cells from any agricultural animal are particularly useful in the methods of the invention. In preferred embodiments the stem cell is a human or mouse embryonic stem cell. The stem cell can be an embryonic stem cell at any stage, preferably a blastocyst stage stem cell, an embryonic germ cell, or a cloned stem cell from a somatic nuclei.

[0018] In another aspect, the invention features a stem cell that includes an Xic transgene substantially identical to a nucleic acid sequence set forth in SEQ ID NOs: 1, 2, 3, 39, or any fragments thereof.

[0019] In yet another aspect, the invention features a stem cell that includes a Tsix transgene substantially identical to a nucleic acid sequence set forth in SEQ ID NOs: 5, 6, 9, 10, 12, 13, 14, 21, 22, 23, 28-32, 36, 40, or any fragments thereof.

[0020] In yet another aspect, the invention features a stem cell that includes an Xite transgene substantially identical to a nucleic acid sequence set forth in SEQ ID NOs: 15, 16, 17, 24, 25, 26, 27, 38, or any fragments thereof.

[0021] In yet another aspect, the invention features a stem cell that includes a Tsix/Xite transgene substantially identical to a nucleic acid sequence set forth in SEQ ID NOs: 4, 11, 19, 37, or any fragments thereof.

[0022] In preferred embodiments of the above aspects, the transgene is expressed in the stem cell. Desirably, the stem cell is an embryonic stem cell, which can be male or female, preferably a female embryonic stem cell. Mammalian embryonic stem cells or embryonic stem cells from any agricultural animal are particularly useful in the methods of the invention. In preferred embodiments the stem cell is a human or mouse embryonic stem cell. The stem cell can be an embryonic stem cell at any stage, preferably a blastocyst stage stem cell, an embryonic germ cell, or a cloned stem cell from a somatic nuclei.

[0023] For any of the stem cells of the invention, the cell transgene can further include a selectable marker or be flanked by LoxP or FRT sequences. The stem cells of the invention can also include a recombinase (e.g., Cre or FLP recombinase), preferably one that is expressed transiently. Any of the stem cells of the invention can also further include a second transgene, or if desired additional transgenes.

[0024] In another aspect, the invention features an isolated small RNA molecule comprising a nucleic acid sequence substantially identical to or complementary to at least 15 nucleotides of a transgene selected from the group consisting of an Xic transgene, a Tsix transgene, an Xite transgene, a Tsix/Xite transgene, an Xist transgene, or any fragments thereof. The small RNA molecule can be a double stranded RNA or an siRNA molecule, and is at least 15 nucleotides, preferably, 17, 18, 19, 20, 21, 22, 23, 24, 25, 26, 27, 28, 29, 30, 31, 32, 33, 34, or 35 nucleotides in length and even up to 50 or 100 nucleotides in length (inclusive of all integers in between). In one embodiment, the small RNA molecule is an siRNA 15 to 32 nucleotides in length.

[0025] In a related aspect, the invention features a composition that includes the small RNA molecule described above formulated to facilitate entry of the small RNA into a cell. In another aspect, the isolated small RNA molecule described above is in a pharmaceutical composition. The pharmaceutical composition can further include a pharmaceutically acceptable carrier. The invention also features a vector that includes the small RNA molecule, wherein the small RNA molecule is operably linked to one or more transcriptional regulatory sequences.

[0026] For either of the above aspects relating to small RNAs, the RNA molecule is substantially identical to or complementary to preferred Xic transgenes, which include any nucleic acid sequence substantially identical to SEQ ID NOs: 1, 2, 3, 39, or any fragments thereof. Preferred Tsix transgenes include any nucleic acid sequence substantially identical to SEQ ID NOs: 5, 6, 9, 10, 12, 13, 14, 21, 22, 23, 28, 29, 30, 31, 32, 36, 40, or any fragments thereof. Particularly preferred Tsix transgenes include the nucleic acid sequences set forth in SEQ ID NOs: 9, 10, 12, 21, 22 and 28-32. Preferred Xite transgenes include any nucleic acid sequence substantially identical to SEQ ID NOs: 15, 16, 17, 24, 25, 26, 27, 38, or any fragments thereof. Preferred Tsix/Xite transgenes include any nucleic acid sequence substantially identical to SEQ ID NOs: 4, 11, 19, 37, or any fragments thereof. Preferred Xist transgenes include any nucleic acid sequence substantially identical to or complementary to SEQ ID NOs: 7, 8, 20, and 35.

[0027] By “stem cell” is meant any cell with the potential to self-renew and, under appropriate conditions, differentiate into a dedicated progenitor cell or a specified cell or tissue. Stem cells can be pluripotent or multipotent. Stem cells include, but are not limited to embryonic stem cells, embryonic germ cells, a cloned stem cell from a somatic nuclei, adult stem cells, and umbilical cord blood cells.

[0028] By “adult stem cell” or “somatic stem cell” is meant an undifferentiated cell found in a differentiated tissue that can renew itself and (with certain limitations) differentiate to yield all the specialized cell types of the tissue from which it originated. Adult stem cells are multipotent. Non-limiting examples of adult stem cells include hematopoietic stem cells, bone marrow-derived stem cells, and neural stem cells (NSC), as well as multipotent stem cells derived from epithelial and adipose tissues and umbilical cord blood (UCB).

[0029] By “embryonic stem cell” is meant a cell, derived from an embryo at the blastocyst stage, or before substantial differentiation of the cell into the three germ layers, that can self-renew and that displays morphological characteristics of undifferentiated cells, distinguishing them from differentiated cells of embryonic or adult origin. Exemplary morphological characteristics include high nuclear/cytoplasmic ratios and prominent nucleoli under a microscope. Under appropriate conditions known to the skilled artisan, embryonic stem cells can differentiate into cells or tissues that are derivatives of each of the three germ layers: endoderm, mesoderm, and ectoderm. Assays for identification of an embryonic stem cell include the ability to form a teratoma in a suitable host or to be stained for markers of an undifferentiated cell such as Oct-4.

[0030] By “differentiation” is meant the process whereby an unspecialized early embryonic cell acquires the features of a specialized cell such as a heart, liver, bone, nerve, or muscle cell. Differentiation can also refer to the restriction of the potential of a cell to self-renew and is generally associated with a change in the functional capacity of the cell. The terms “undifferentiated,” or “delaying” or “blocking” differentiation, are used broadly in the context of this invention and include not only the prevention of differentiation but also the altering or slowing of the differentiation process of a cell. It will be understood by the skilled artisan that colonies of undifferentiated cells can often be surrounded by neighboring cells that are differentiated; nevertheless, the undifferentiated colonies will persist when the population is cultured or passaged under appropriate conditions, and individual undifferentiated cells will constitute a substantial portion (e.g., at least 5%, 10%, 20%, 40%, 60%, 80%, 90% or more) of the cell population. Differentiation of a stem cell can be determined by methods well known in the art and these include analysis for cell markers or morphological features associated with cells of a defined differentiated state. Examples of such markers and features include measurement of glycoprotein, alkaline phosphatase, and carcinoembryonic antigen expression, where an increase in any one of these proteins is an indicator of differentiation Additional examples are described herein. In preferred embodiments, if less than 10%, 5%, 4%, 3%, 2%, or 1% of the cells in a population express a marker or morphological feature of differentiation after an established number of days in culture (e.g., 2, 3, 4, 5, 6, or 7 days or more), then the cells are undifferentiated. Differentiation can also be determined by assays for X chromosome inactivation. Examples of such assays are described herein and include measurement of Xist expression by fluorescent in situ hybridization (FISH) or RT-PCR or measurement of interchromosomal distances by FISH (X-X pairing). In one example, if after an established number of days in culture (e.g., 2, 3, 4, 5, 6, or 7 days or more), fewer than 20%, 15%, 10%, 5%, 4%, 3%, 2%, or 1% of the cells in a population show an increase in Xist expression as measured by FISH or RT-PCR or show X-X pairing as measured by FISH, then the cells are undifferentiated.

[0031] By “fragment” is meant a portion of a nucleic acid molecule that contain at least 1%, 5%, 10%, 20%, 30%, 40%, 50%, 60%, 70%, 80%, or 90% of the entire length of the reference nucleic acid molecule. In the present invention, a fragment includes any fragment of the X inactivation center (Xic) that includes at least 10, 17, 18, 19, 20, 21, 22, 23, 24, 25, 26, 27, 28, 29, 30, 31, 32, 33, 34, 35, 40, 50, 60, 68, 70, 80, 90, 100, 200, 300, 400, 500, 600, 700, 800, 900, 1000, 1500, 2000, 3000, 3700, 4000, 5000, 10,000, 15,000, 19,500, 20,000, or more nucleotides up to the entire length of the Xic (approximately 100 kB). Preferred fragments are described herein and are shown in Tables 1 and 2 and FIGS. 1, 2, 3A, 3B, and 30B. One preferred fragment is a small RNA nucleic acid sequence, often called siRNA, which can serve as a specificity determinant in the RNA interference (RNAi) pathway.

[0032] “RNAi,” also referred to in the art as “gene silencing” and/or “target silencing”, e.g., “target mRNA silencing”), refers to a selective intracellular degradation of RNA. RNAi occurs in cells naturally to remove foreign RNAs (e.g., viral RNAs). Natural RNAi proceeds via fragments cleaved from free dsRNA which direct the degradative mechanism to other similar RNA sequences. Alternatively, RNAi can be initiated by the hand of man, for example, to silence the expression of target genes. The unifying features of RNA silencing phenomena are the production of small RNAs, at least 15 nt in length, preferably 15-32 nt, most preferably 17 to 26 nt in length, that act as specificity determinants for down-regulating gene expression and the requirement for one or more members of the Argonaute family of proteins (or PPD proteins, named for their characteristic PAZ and Piwi domains). Recently it has been noted that larger siRNA molecules, for example, 25 nt, 30 nt, 50 nt, or even 100 nt or more, can also be used to initiate RNAi. (See for example, Girard et al., Nature Jun. 4, 2006, e-publication ahead of print, Aravin et al., Nature Jun. 4, 2006, e-publication ahead of print, Grivna et al., Genes Dev. Jun. 9, 2006, e-publication ahead of print, and Lau et al., Science Jun. 15, 2006, e-publication ahead of print.)

[0033] The term “small RNA” is used throughout the application and refers to any RNA molecule, either single-stranded or double-stranded” that is at least 15 nucleotides, preferably, 17, 18, 19, 20, 21, 22, 23, 24, 25, 26, 27, 28, 29, 30, 31, 32, 33, 34, or 35, nucleotides in length and even up to 50 or 100 nucleotides in length (inclusive of all integers in between). Preferably, the small RNA is capable of mediating RNAi. As used herein the phrase “mediates RNAi” refers to (indicates) the ability to distinguish which RNAs are to be degraded by the RNAi machinery or process. Included within the term small RNA are “small interfering RNAs” and “microRNA.” In general, microRNAs (miRNAs) are small (e.g., 17-26 nucleotides), single-stranded noncoding RNAs that are processed from approximately 70 nucleotide hairpin precursor RNAs by Dicer. Small interfering RNAs (siRNAs) are of a similar size and are also non-coding, however, siRNAs are processed from long dsRNAs and are usually double stranded (e.g., endogenous siRNAs). siRNAs can also include short hairpin RNAs in which both strands of an siRNA duplex are included within a single RNA molecule. Small RNAs can be used to describe both types of RNA. These terms include double-stranded RNA, single-stranded RNA, isolated RNA (partially purified RNA, essentially pure RNA, synthetic RNA, recombinantly produced RNA), as well as altered RNA that differs from naturally occurring RNA by the addition, deletion, substitution and/or alteration of one or more nucleotides. Such alterations can include addition of non-nucleotide material, such as to the end(s) of the small RNA or internally (at one or more nucleotides of the RNA). Nucleotides in the RNA molecules of the present invention can also comprise non-standard nucleotides, including non-naturally occurring nucleotides or deoxyribonucleotides. Small RNAs of the present invention need only be sufficiently similar to natural RNA that it has the ability to mediate RNAi.

[0034] By the process of “genetic modification” or “genetic alteration” is meant the introduction of an exogenous gene or foreign gene into mammalian cells. The term includes but is not limited to transduction (viral mediated transfer of host DNA from a host or donor to a recipient, either in vivo or in vitro), transfection, liposome mediated transfer, electroporation, calcium phosphate transfection or coprecipitation. Methods of transduction include direct co-culture of cells with producer cells or culturing cells with viral supernatant alone with or without appropriate growth factors and polycations.

[0035] The term “identity” is used herein to describe the relationship of the sequence of a particular nucleic acid molecule to the sequence of a reference nucleic acid molecule. For example, if a nucleic acid molecule has the same nucleotide residue at a given position, compared to a reference molecule to which it is aligned, there is said to be “identity” at that position. The level of sequence identity of a nucleic acid molecule to a reference nucleic acid molecule is typically measured using sequence analysis software with the default parameters specified therein, such as the introduction of gaps to achieve an optimal alignment (e.g., Sequence Analysis Software Package of the Genetics Computer Group, University of Wisconsin Biotechnology Center, 1710 University Avenue, Madison, Wis. 53705, BLAST, or PILEUP/PRETTYBOX programs). These software programs match identical or similar sequences by assigning degrees of identity to various substitutions, deletions, or other modifications.

[0036] A nucleic acid molecule is said to be “substantially identical” to a reference molecule if it exhibits, over its entire length, at least 51%, preferably at least 55%, 60%, or 65%, and most preferably 75%, 85%, 90%, 95%, 96%, 97%, 98%, 99% or even 100% identity to the sequence of the reference molecule. For nucleic acid molecules, the length of comparison sequences is at least 10, 17, 18, 19, 20, 21, 22, 23, 24, 25, 26, 27, 28, 29, 30, 31, 32, 33, 34, 35, 40, 50, 60, 68, 70, 80, 90, 100, 200, 300, 400, 500, 600, 700, 800, 900, 1000, 1500, 2000, 3000, 3700, 4000, 5000, 10,000, 15,000, 19,500, 20,000, or more nucleotides up to and including the entire length of the Xic (approximately 100 kB for the mouse Xic).

[0037] It should be noted that while protein-coding genes that are homologous generally share a significant level of homology (generally greater than 70%), the overall level of homology for noncoding genes and cis regulatory elements, such as the regions included in the present invention, is generally less than 60%. For example, the same Xic from different strains of mice have sequence variation on the order of one nucleotide change per 100 nucleotides. In another example, for the DxPas 34 repeats, the repeat length varies from strain to strain from 15-40 nucleotides. In yet another example, within Xite in particular, the sequence variation between strains can include basepair insertions, deletion, and single nucleotide polymorphisms. Furthermore, homology for noncoding genes and cis regulatory elements is often limited to smaller domains (e.g., 30 to 100 nt in length). As a result, more sensitive methods such as PipMaker analysis and Bayesian block analysis can be used to measure the homology or identity of a particular noncoding gene region or cis regulatory element (Schwartz et al., Genome Research 10: 577-586 (2000)).

[0038] By “inactivating the transgene” is meant reducing or eliminating the ability of the transgene to block differentiation or XCI. In one example, inactivation of the transgene can be achieved through removal of the transgene (e.g., using a site specific recombinase and DNA recognition sequences flanking the transgene). In another example, if a viral vector is used for introduction of the transgene into the cell, removal of the origin of replication (e.g., using a site specific recombinase and DNA recognition sequences flanking the origin of replication) can result in a loss of the viral sequences, including the transgene, after propagation. Inactivation of the transgene can be measured using the assays for differentiation, XCI, or nucleation of interchromosomal pairing as described herein.

[0039] By “isolated” is meant substantially free of other cellular material, or culture medium when produced by recombinant techniques, or substantially free of chemical precursors or other chemicals when chemically synthesized.

[0040] By “nucleic acid molecule” is meant any chain of nucleotides or nucleic acid mimetics. Included in this definition are natural and non-natural oligonucleotides, both modified and unmodified.

[0041] By “pharmaceutically acceptable carrier” is meant a carrier that is physiologically acceptable to the treated mammal while retaining the therapeutic properties of the compound with which it is administered. One exemplary pharmaceutically acceptable carrier substance is physiological saline. Other physiologically acceptable carriers and their formulations are known to one skilled in the art and described, for example, in Remington's Pharmaceutical Sciences, (20^{th} edition), ed. A. Gennaro, 2000, Lippincott, Williams & Wilkins, Philadelphia, Pa.

[0042] By “proliferation” is meant the expansion of a population of cells by the continuous division of single cells into two identical daughter cells.

[0043] By “purified” is meant separated from other components that naturally accompany it. Typically, a compound (e.g., nucleic acid) is substantially pure when it is at least 50%, by weight, free from proteins, antibodies, and naturally-occurring organic molecules with which it is naturally associated. Preferably, the compound is at least 75%, more preferably, at least 90%, and most preferably, at least 99%, by weight, pure. A substantially pure compound may be obtained by chemical synthesis, separation of the factor from natural sources, or production of the compound in a recombinant host cell that does not naturally produce the compound. Nucleic acid molecules may be purified by one skilled in the art using standard techniques such as those described by Ausubel et al. (Current Protocols in Molecular Biology, John Wiley & Sons, New York, 2000). The nucleic acid molecule is preferably at least 2, 5, or 10 times as pure as the starting material, as measured using polyacrylamide gel electrophoresis, column chromatography, optical density, HPLC analysis, or western analysis.

[0044] By “recombinase” is meant any member of a group of enzymes that can facilitate site specific recombination between defined sites, where the sites are physically separated on a single DNA molecule or where the sites reside on separate DNA molecules. The DNA sequences of the defined recombination sites are not necessarily identical. There are several subfamilies including “integrase” (including, for example, Cre and λ integrase) and “resolvase/invertase” (including, for example, ΨC31 integrase, R4 integrase, and TP-901 integrase). Two preferred recombinases and their DNA recognition sequences are Cre (recombinase)-lox (recognition sequence) or flippase (FLP) (recombinase)-Frt (recognition sequence). (See Fukushige et al., Proc. Natl. Acad. Sci. USA 89:7905-7909 (1992); O'Gorman, et al., Science 251:1351-1335 (1991); Sauer et al., Proc. Natl. Acad. Sci. USA 85:5166-70 (1988); Sauer et al., Nuc. Acids Res. 17:147-161 (1989); Sauer et al., New Biol. 2:441-49 (1990); and Sauer, Curr. Opin. Biotechnol. 5:521-7 (1994)). Desirably, recombinase expression in the cell is “transient.” By “transient expression” is meant expression that diminishes over a relatively brief time span. Transient expression can be achieved by introduction of the recombinase as a purified polypeptide, for example, using liposomes, coated particles, or microinjection. Transient expression can also be achieved by introduction of a nucleic acid sequence encoding the recombinase enzyme operably linked to a promoter in an expression vector that is then introduced into the cell. Expression of the recombinase can also be regulated in other ways, for example, by placing the expression of the recombinase under the control of a regulatable promoter (i.e., a promoter whose expression can be selectively induced or repressed). It is generally preferred that the recombinase be present for only such time as is necessary for removal of the transgene sequences from the cell.

[0045] A “recombinase recognition sequence” refers to any DNA sequence recognized by a specific recombinase protein. Examples include the loxP site, which consists of two 13-bp inverted repeats flanking an 8-bp nonpalindromic core region and is recognized by Cre recombinase and the 34-bp FRT site recognized by FLP recombinase. Variants of the wild type recognition sequences are included herein. Variants can be identified by their ability to be recognized by the appropriate recombinase, as described below.

[0046] By “syntenic” is meant a corresponding gene or chromosome region occurring in the same order on a chromosome of a different species. Syntenic genes or chromosome regions are not necessarily highly homologous particularly if the conserved elements are noncoding. For example, the syntenic portion of the mouse X-inactivation center is found at human Xq13.

[0047] By “teratoma” is meant a tumor composed of tissues from the three embryonic germ layers, usually found in ovary and testis. A teratoma is generally produced experimentally in animals by injecting pluripotent stem cells and is used to determine the ability of the stem cell to differentiate into various types of tissues.

[0048] By “Tsix transgene” is meant a nucleic acid fragment substantially identical to a mammalian Tsix sequence, or any fragment thereof, that is introduced into a cell by artificial means. The transgene may or may not be integrated into the cell chromosome and may or may not be expressed. The transgene may or may not be episomal. Non-limiting examples of preferred Tsix transgene sequences include nucleic acid sequences at least substantially identical to the full-length mouse Tsix gene (FIG. 5, SEQ ID NO: 6), or fragments thereof, and nucleic acids at least substantially identical to fragments of the mouse Tsix gene such as pCC3 (SEQ ID NO: 9), p3.7 (SEQ ID NO: 10), DxPas34 (SEQ ID NO: 12), the 34 bp repeat of DxPas34 (SEQ ID NO: 13), the 68 bp repeat of DxPas34 (SEQ ID NO: 14), ns25 (SEQ ID NO: 21), ns41 (SEQ ID NO: 22), ns82 (SEQ ID NO: 23), mouse repeat A1 (SEQ ID NO: 28), mouse repeat A2 (SEQ ID NO: 29), mouse repeat B (SEQ ID NO: 30), rat repeat A (SEQ ID NO: 31), and rat repeat B (SEQ ID NO: 32). Another preferred Tsix transgene sequence includes at least 2 copies of the 34 bp or 68 bp DxPas34 repeat (SEQ ID NOs: 13 or 14, respectively), as well as at least 3 copies, at least 4 copies, and at least 5 copies or more. These preferred fragments are diagrammed in FIGS. 1, 2, and 3A and the sequences are provided in FIGS. 3B, 4, 5, and 30B. Additional non-limiting examples of preferred Tsix transgene sequences include nucleic acid sequences substantially identical to the full-length human Tsix gene (SEQ ID NO: 35), the human repeat A (SEQ ID NO: 40), or any fragments thereof, and nucleic acid sequences substantially identical to any mammalian (e.g., human, primate, bovine, ovine, feline, and canine) homologues, orthologues, paralogues, species variants, or syntenic variants of the mouse Tsix sequence (SEQ ID NO: 6), or fragments thereof. Species variations include polymorphisms in Xite and Tsix that occur between strains of mice including, but not limited to, C57BL/6, 129. and CAST/Ei mice. As indicated above for SEQ ID NOs: 13 and 14, it should be noted that for any of the fragments, particularly the smaller fragments such as SEQ ID NOs: 28, 29, 30, 31, 32, and 40, the transgene can include multiple copies of the sequences, for example, in tandem array (e.g., at least 2 copies, at least 3 copies, at least 4 copies, and at least 5 copies or more).

[0049] By “Xite transgene” is meant a nucleic acid fragment substantially identical to a mammalian Xite sequence, or any fragment thereof, that is introduced into a cell by artificial means. The transgene may or may not be integrated into the cell chromosome and may or may not be expressed. The transgene may or may not be episomal. Non-limiting examples of preferred Xite transgene sequences include nucleic acid sequences at least substantially identical to the full-length mouse Xite gene (FIG. 7, SEQ ID NO: 15), or fragments thereof, and nucleic acids at least substantially identical to fragments of the mouse Xite gene such as pXite (SEQ ID NO: 16), Xite Enhancer (SEQ ID NO: 17), ns130 (SEQ ID NO: 24), ns135 (SEQ ID NO: 25), ns155 (SEQ ID NO: 26), ns132 (SEQ ID NO: 27). These preferred fragments are diagrammed in FIGS. 1, 2, and 3A and the sequences are provided in FIGS. 3B, 4, and 7. Additional non-limiting examples of preferred Xite transgene sequences include nucleic acid sequences substantially identical to the human Xite gene (SEQ ID NO: 38), or fragments thereof, and nucleic acid sequences substantially identical to any mammalian (e.g., human, primate, bovine, ovine, feline, and canine) homologues, orthologues, paralogues, species variants, or syntenic variants of the mouse Xite sequence (SEQ ID NO: 15), or fragments thereof. Species variations include polymorphisms in Xite and Tsix that occur between strains of mice including, but not limited to, C57BL/6, 129, and CAST/Ei mice.

[0050] By “Tsix/Xite transgene” is meant a nucleic acid substantially identical to a mammalian Tsix, Xite, or combined or intervening Tsix/Xite sequence, or any fragment thereof, that is introduced into a cell by artificial means. The transgene may or may not be integrated into the cell chromosome and may or may not be expressed. The transgene may or may not be episomal. Sequences that include a region that spans all or a portion of both genes or the intervening region between the two genes are known as Tsix/Xite transgene and can also be used in the methods of the invention. Non-limiting examples of preferred Tsix/Xite transgenes include nucleic acid sequences substantially identical to the critical region spanning both genes in the mouse, such as pSxn (SEQ ID NO: 4), pCC4 (SEQ ID NO: 11), and the bipartite enhancer (SEQ ID NO: 19). These preferred fragments are diagrammed in FIGS. 1 and 3A and the sequences are provided in FIGS. 3B and 4. Additional non-limiting examples of preferred Tsix/Xite transgene sequences include nucleic acid sequences substantially identical to the critical region spanning both genes in the human chromosome, such as pSxn human (SEQ ID NO: 37), or fragments thereof, and nucleic acid sequences substantially identical to any mammalian (e.g., human, primate, bovine, ovine, feline, and canine) homologues, orthologues, paralogues, species variants, or syntenic variants of the critical region spanning both Tsix and Xite genes in the mouse, or fragments thereof. Species variations include polymorphisms in Xite and Tsix that occur between strains of mice including, but not limited to, C57BL/6, 129, and CAST/Ei mice.

[0051] By “Xic transgene” is meant a nucleic acid molecule substantially identical to a mammalian Xic region that is introduced into a cell by artificial means. The transgene may or may not be integrated into the cell chromosome and may or may not be expressed. The transgene may or may not be episomal. Preferred Xic transgenes include the full-length mouse Xic (SEQ ID NO: 1), nucleotides 80,000 to 180,000 of GenBank Accession No. AJ421479 (SEQ ID NO: 33). Each of the mouse transgenes described herein is found within this 100 kB fragment of AJ421749. For example, mouse Xist is found from nt 106,296 to nt 129,140, the mouse Tsix/Xite sequences are found within nt 157,186 to nt 104,000, and mouse Tsx sequence is found from nt 174,041 to nt 163,932. Another fragment within the mouse Xic is Jpx/Enox, found from nt 95,894 to nt 86,564 of AJ421479. Preferred Xic fragments include πJL2 (SEQ ID NO: 2) and πJL3 (SEQ ID NO: 3). Additional non-limiting examples of preferred Xic transgene sequences include nucleic acid sequences substantially identical to the human Xic (SEQ ID NO: 39), or fragments thereof, and nucleic acid sequences substantially identical to any mammalian (e.g., human, primate, bovine, ovine, feline, and canine) homologues, orthologues, paralogues, species variants, or syntenic variants of the mouse Xic (SEQ ID NO: 1), or fragments thereof.

[0052] By “Xist transgene” is meant a nucleic acid substantially identical to a mammalian mammalian Xist sequence, or any fragment thereof, that is introduced into a cell by artificial means. The transgene may or may not be integrated into the cell chromosome and may or may not be expressed. The transgene may or may not be episomal. Non-limiting examples of preferred Xist transgene sequences include nucleic acid sequences at least substantially identical to the full-length mouse Xist gene (FIG. 6, SEQ ID NO: 20), or fragments thereof, and nucleic acids at least substantially identical to fragments of the mouse Xist gene such as pXist 3′ (SEQ ID NO: 7) and pXist 5′ (SEQ ID NO: 8). These preferred fragments are diagrammed in FIG. 1 and the sequences are provided in FIG. 6. Additional non-limiting examples of preferred Xist transgene sequences include nucleic acid sequences substantially identical to the human Xist gene (SEQ ID NO: 35), or fragments thereof, and nucleic acid sequences substantially identical to any mammalian (e.g., human, primate, bovine, ovine, feline, and canine) homologues, orthologues, paralogues, species variants, or syntenic variants of the mouse Xist sequence (SEQ ID NO: 20), or fragments thereof. Species variations include polymorphisms in Xist that occur between strains of mice including, but not limited to, C57BL/6, 129, and CAST/Ei mice.

[0053] Stem cell differentiation is an irreversible process and commitment to the differentiation pathway prevents or greatly reduces the clinician's or investigator's ability to modify the stem cell in a way that is therapeutically useful. The enormous therapeutic potential of stem cells relies on the ability to control stem cell differentiation. Thus, there is a need for efficient methods for blocking or delaying differentiation in a stem cell in a manner that is reversible. The present invention provides such novel methods for controlling stem cell differentiation and allows for both the inhibition and induction of stem cell differentiation in a controlled manner. The present invention is based on the discovery that disruptions in the XCI process, either by an excess or a depletion of Xic, Tsix, and Xite, can block differentiation. In the present methods, disruptions in the XCI process are achieved through the use of transgenes or small RNAs derived from Xic, Tsix or Xite sequences, or fragments thereof, that are introduced into stem cells and prevent the stem cells from undergoing X chromosome inactivation and from differentiating in culture. These novel methods for manipulating stem cell differentiation allow the clinician or researcher to maintain the stem cells in the undifferentiated state for a sufficient time to modify the cells as desired (e.g., by introducing therapeutic genes) for therapeutic or research purposes, without having the limitations of cell or cell product contamination or inefficient inhibition of differentiation. The methods also allow the clinician to readily remove the block to differentiation, again in an efficient manner and free from contamination issues, so that the cells can be administered to a subject. The invention also features cells produced by the methods of controlling or delaying differentiation that can self-renew indefinitely in culture and are useful for therapeutic purposes such as regenerative medicine and gene therapy.

[0054] Other features and advantages of the invention will be apparent from the following Detailed Description, the drawings, and the claims.

### BRIEF DESCRIPTION OF THE DRAWINGS

[0055] FIG. 1 is a diagram of the Xic region showing a set of preferred transgenes for blocking stem cell differentiation.

[0056] FIG. 2 is a diagram of a subset of the Xic region showing the Tsix/Xite junction in greater detail. Additional preferred transgenes are indicated.

[0057] FIGS. 3A-3B are a diagram and corresponding nucleic acid sequence of the pSxN transgene. FIG. 3A is a diagram of the pSxN6 (also referred to as pSxN) transgene showing a set of preferred transgenes for blocking stem cell differentiation. This region includes the 5′ end of Tsix and Xite and contains elements critical for counting (numerator), cell differentiation, imprinting, choice, and mutual exclusion of X's. FIG. 3B is an annotated sequence map of the pSxN transgene (SEQ ID NO: 4). The sequence map is annotated to show restriction sites and the specific location of each of the transgenes identified in FIG. 3A.

[0058] FIG. 4 is an annotated nucleic acid sequence showing the 34 and 68 base pair repeats (SEQ ID NO: 13 and 14, respectively) of the DxPas34 transgene (SEQ ID NO: 12). Each line of sequence represents a 34 base pair repeat. These repeats are located between nt 5074-6630 of SEQ ID NO: 4 (FIG. 3B). Note that the 34 and 68 bp repeats are not exact repeats but vary slightly from one to the next.

[0059] FIG. 5 is a nucleic acid sequence showing the mouse Tsix RNA sequence (unspliced form; SEQ ID NO: 6).

[0060] FIG. 6 is a nucleic acid sequence showing the full-length mouse Xist RNA (unspliced form; SEQ ID NO: 20).

[0061] FIG. 7 is a nucleic acid sequence showing the mouse Xite region (SEQ ID NO: 15). This sequence is oriented in the same direction as the annotated sequence of pSxn (FIG. 3). Xite initiates in multiple locations within two clusters of start sites. The first cluster is around nt 6995-5773 (where there is the 1.2 kb enhancer). The second cluster is around nt 13000-12500. Note that all transcripts proceed in the antisense orientation (e.g., from nt 6995 to nt 1). Also note that Xite does not “end.” It just diminishes when it reaches Tsix. Also note that the second of the two start clusters is outside of the pSxn critical region but is still part of Xite.

[0062] FIGS. 8A-8E show the manifestations of a counting defect, candidate counting regions, and isolation of X^{Δ}X^{Δ}, X^{Δ}O, and X^{Δ}Y ES cells. FIG. 8A is a diagram showing the patterns of normal and aberrant counting. Solid black circles, _{Xi}. Clear circles, Xₐ. FIG. 8B is a diagram of the Xic showing existing deletions that are thought to either affect or spare counting. Horizontal dotted lines delineate the extent of each knockout. Hypothetical region for counting elements shown in orange color. FIG. 8C is a Southern blot analysis of select newly isolated X^{Δ}X^{Δ}, X^{Δ}O, and X^{Δ}Y ES lines. FIG. 8D is a photomicrograph showing the results of DNA FISH on Δf5 cells, using an X-linked probe from the Xite locus (pDNT1) demonstrating two Xs in mutant lines. FIG. 8E is a photomicrograph of Y-chromosome painting identifying Δf4 as an X^{Δ}Y clone. Chromosome painting was carried out as recommended by the manufacturer (Cambio, UK).

[0063] FIGS. 9A-9F show aberrant differentiation and XCI in X^{Δ}X^{Δ} but not X^{Δ}O or X^{Δ}Y clones. FIG. 9A is a series of phase contrast images of mutant EB taken at the same magnification. X^{Δ}X^{Δ} EB (Δf5 shown) showed poor differentiation between d2 and d6 (d, day), but some EB eventually showed sparse outgrowth by d9. X^{Δ}O (Δf32 shown), X^{Δ}X (BA9, not shown) and X^{Δ}Y (Δf4, not shown) showed normal differentiation throughout. FIG. 9B is a graph showing quantitation of cell death. Day 0 showed <<1% death in all cell lines. Data shown represent averages of three experiments. As calculated by the student t-test, statistical significance (P) is indicated in the table below. Each cell line was tested against the WT control. FIG. 9C is a series of images showing RNA/DNA FISH using probes for Xist RNA (FITC-labeled, green) and Xite DNA (Cy3-labelled, red) to mark the X-chromosome. FIG. 9D is a diagram showing XCI patterns on d3 of differentiation. >200 nuclei were counted for each sample from two experiments. n.a., not applicable. FIG. 9E is an image showing RNA/DNA FISH of a poorly growing Δf25 EB (X^{Δ}X^{Δ}) on day 6 showing numerous nuclei with two Xᵢ. Xist RNA, green. Xite DNA, red. FIG. 9F is an image showing RNA/DNA FISH on later differentiation days, with the majority of surviving X^{Δ}X^{Δ} cells (Δf41 shown) displaying only a single Xᵢ. Xist RNA, green. Xite DNA, red.

[0064] FIGS. 10A-10E show the creation of female transgenic ES lines carrying the Xic. FIG. 10A is a map of the Xic and P1 transgenes covering various regions of the Xic. The transgene sequences are: πJL2, an 80 kb P1 plasmid containing Xist and 30 kb upstream and downstream sequence (Lee et al., Proc. Natl. Acad. Sci. U.S.A. (1999), supra); πJL3, an 80 kb P1 plasmid containing Xist and 60 kb of sequence downstream (Lee et al., Proc. Natl. Acad. Sci. U.S.A. (1999), supra); and pSx7, the BssHII-NotI fragment of πJL1. Transgenes were introduced by electroporation, as previously described (Lee et al., Proc. Natl. Acad. Sci. U.S.A. (1999) supra), together with a Neo selectable marker (pGKRN) at 0.1 molar ratio. All transgenic lines used here have autosomal insertions. FIG. 10B is a Southern blot analysis of transgenic cells lines. Copy number analysis was carried out as described previously (Lee et al., Proc. Natl. Acad. Sci. U.S.A. (1999) supra). Xist copy numbers were normalized to Dnmt1. FIG. 10C is a series of phase contrast images of WT and transgenic EB differentiated for 5 days. All images are at the same magnification. FIG. 10D is a series of images showing RNA/DNA FISH for detecting Xist RNA (green) and the X-chromosome (Xite DNA, red). Cells from day 4. X, X-chromosome; T, transgenic autosome. Red arrows point to sparse Xist RNA aggregates seen in high-copy clones. FIG. 10E is a table showing that the frequency of Xist expression (as determined by RNA/DNA FISH) inversely correlated with transgene copy number.

[0065] FIGS. 11A-11E show the finer transgene mapping revealing that Tsix and Xite harbor counting elements. FIG. 11A is a map of the Xic and finer transgenes. The sequences carried by each transgene are: pSxn, a 19.5 kb RsrII-NotI fragment of πJL1 (SEQ ID NO: 4); p3.7, the 3.7 kb MluI-SacI sequence deleted from TSix^{ΔCpG} (SEQ ID NO: 10; Lee et al., Cell (1999) supra); pCC3, a 4.3 kb BamHI fragment downstream of the Tsix promoter (SEQ ID NO: 9); pCC4, a 5.9 kb BamHI fragment upstream of and including the Tsix promoter (SEQ ID NO: 11); pXite, a 5.6 kb fragment spanning DHS1-4 of Xite (Ogawa et al., supra); pXist5′, a 4.8 kb XbaI-XhoI fragment from the Xist promoter (SEQ ID NO: 8); pXist3′, a 4.9 kb PstI fragment from Xist exon 7 (SEQ ID NO: 7); and pTsx, bp 41,347-52,236 of Genbank X99946 from the Tsx locus (SEQ ID NO: 18). Except pXist3′, a Neo selectable marker is engineered into each plasmid for selection in ES cells. All lines characterized here have autosomal insertions. Solid purple bars, elements with strongest counting properties; dashed purple bars, elements which also have counting properties, albeit weaker than the former. FIG. 11B is a graph showing cell death analysis of select transgenic cell lines by the trypan blue assay. The data represent averages of three experiments. As calculated by the student t-test, statistical significance (P) is indicated in the adjacent table. Each test cell line was tested against the control, WTneo. FIG. 11C is a series of phase contrast images of transgenic EB and controls taken at the same magnification. For clones 3.7-11 and Xite-11, note large size of EB on d5 and massive degeneration by d8. FIG. 11D is a diagram showing XCI patterns in transgenic and control cell lines on d3. At least 200 nuclei were counted for each sample from two experiments. In Tsix and Xite transgenics, >50,000 cells on the slide were examined to conclude that 0% showed Xist expression. n.a., not applicable. FIG. 11E is a series of images showing repression of XCI in Tsix and Xite female transgenic lines but not in Xist or Tsx lines. RNA/DNA FISH to detect Xist RNA (green) and transgenic chromosome using p3.7, pXite, or pTsx plasmids as probe (red). X, X-chromosome; T, transgenic autosome.

[0066] FIGS. 12A-12D show the duality model for counting. FIG. 12A is a diagram showing the singularity model. Counting represents the titration of X-factors (green circles) and A-factors (violet circles). A-factors can originate from multiple distinct autosomes. The coupling of A- to X-factors forms the ‘blocking factor’ (BF). Any untitrated X-factor is degraded. Choice results from the binding of BF to one Xic, which then represses initiation of XCI. The Xi forms by default. X, X-chromosome. A, autosome. FIG. 12B is a diagram showing the duality model. Just as in the singularity model, the complexing of A- and X-factors forms BF. However, untitrated X-factor(s) results in the formation of a second complex dubbed the ‘competence factor’ (CF). The choice step represents the binding of BF and CF to the Xic. BF binding blocks XCI on the future Xₐ, while CF binding to the remaining X induces XCI on the future Xᵢ. The duality model implies that BF and CF bind in a mutually exclusive fashion. BF and CF most likely bind to the 5′ regions of Tsix and Xite. FIG. 12C is a diagram showing aberrant counting and chaotic choice in the X^{Δ}X^{Δ} mutant. Depicted are four equally likely outcomes during cell differentiation. The two top outcomes achieve dosage compensation and result in viable cells. These cells are presumed to be the surviving day 9 EB cells in FIG. 9A and the dosage compensated cells in FIG. 9F. They give rise to the occasional X^{Δ}X^{Δ} mice born (Lee, Nature Genet. (2002), supra). The two bottom outcomes lead to either two Xᵢ's or two Xₐ's (due to loss of mutual exclusion and ensuing ‘chaos’)—states which are not viable. Tsix deletion represented by gap in X. FIG. 12D is a diagram showing the occurrence of multiple Tsix or Xite sequences on autosomes squelches the blocking and competence factors from the endogenous Xic, leading to constitutively active X's in transgenic cells. Black boxes are Xic sequences, in whole or in part. ATg, transgenic autosome.

[0067] FIG. 13 is a series of phase contrast images showing aberrant cell differentiation in X^{Δ}X^{Δ} clones. Phase contrast images of mutant EB at the same magnification on days (d) of differentiation are indicated. To generate EZB, ES colonies were trypsinized into detached cellular clusters on d), grown in suspension culture for 4 days in DME/15% FBS without LIF and adhered to gelatinized plates thereafter to obtain outgrowths. Note: While many of the X^{Δ}X^{Δ} EB degenerated by d*, a significant fraction of EB did outgrow (examples shown), but the extent of outgrowth was generally less robust that WT or X^{Δ}O.

[0068] FIG. 14 is a series of phase contrast images showing aberrant cell differentiation in Tsix/Xite-containing transgenic lines. Phase contrast images of mutant and wild type EB at the same magnification on the indicated differentiation day are shown. All Tsix/Xite-containing XX transgenes result in poor EB outgrowth on day 5 and died massively by day 8. >99% of unattached cells were dead, as determined by trypan blue uptake. XY lines containing the same transgenes and XX lines containing Xist, Tsx, and vector transgenes did not display this phenotype. Among the Tsix/Xite transgenics, p3.7 and pXite transgenics showed unusually high radial growth (two clones of each shown). As compared to larger transgenes, pCC3, pCC4, and pSxN transgenics also did so but to a lesser and more variable extent. πJL2, πJL3, and pSx7 had elevated cell death rates as well but their EB colonies were not unusually large.

[0069] FIGS. 15A-D show evidence for X-X homologous associations. FIG. 15A is a series of images and graphs showing DNA FISH and X-X distribution profiles of wild-type female ES nuclei from day 0 to day 6 of differentiation and of MEFs. Two-probe combination: Xic DNA-green (pSxn-FITC)+Tsx DNA-red (pTsx-Cy3). DAPI (4′,6′-diamidino-2-phenylindole), blue. Each image is a two-dimensional (2D) representation of 3D image stacks of 0.2μ z-sections. The distributions display the normalized distances, ND=X-X distance/d, where d=2×(nuclear area/π)^{0.5}. ND ranges from 0 to 1. Mean distance, open triangle. FIG. 15B is a series of graphs showing the cumulative frequency curves for X-X pairs at 0.0 to 0.2 ND. P (KS test) was calculated in pairwise comparison against day O, Sample sizes for each experiment (n)=174 to 231. FIG. 15C is a graph showing the X-X distances <0.05 ND. Distances were graphed with standard deviations (SD) from three independent experiments. FIG. 15D is a diagram of the Xic and a graph showing proximity pairing is specific to the Xic. X-X distribution profiles for X-linked loci shown in the map. The KS test (P) compared Xic versus flanking loci. n=166 to 188.

[0070] FIGS. 16A-D show the homologous association that occurs during the initiation phase of XCI. FIG. 16A is a series of images and graphs showing RNA-DNA FISH for day 2 wild-type XX cells. Xic DNA, green (pSxn-FITC); Xist RNA, red (strand-specific riboprobes-Cy3). FIGS. 16B to 16D are a series of graphs showing the cumulative distributions for day 2 wild-type XX cells, comparing Xist⁺ (n=74) versus Xist⁻ (n=180) cells (FIG. 16B); Ezh2⁺ (n=33) versus Ezh2⁻ cells (n=178) (FIG. 16C); and H3-3meK27⁺ (n=48) versus H3-3meK27⁻ (n=188) cells (FIG. 16D).

[0071] FIGS. 17A-F show Tsix and Xite are necessary and sufficient for X-X pairing. FIG. 17A is a map of the Xic, Tsix^{ΔCpG} and Xite^{ΔL}, and various transgenes. FIG. 17B is a series of graphs showing the X-X distributions for Tsix and Xite mutants from day 0 to day 6. n=181 to 223. KS test compares each curve to the day 0 curve. FIG. 17C is a diagram showing the Tsix alleles and primers (red) used for 3C analysis. BamHI sites, blue arrow. FIG. 17D shows the 3C analysis of pairwise interactions in X^{ΔTsix(neo+)}X cells and p3.7 females. Primers pairs are indicated to the right of gels. C, positive control ligations. All minus-crosslinking (N) and minus-ligation controls were negative. FIG. 17E is a graph showing the relative pairing frequencies (X) on day n (dn) was normalized to β-globin (βg) and to day 0 values, using the equation shown. S, signal intensity quantitated by densitometry. Average and SD from three independent experiments. FIG. 17F DNA FISH and X-A distribution curves for transgenic ES cells. The transgene was labeled red by a Neo probe and the X labeled green by a pSx7 probe (for p3.7, pXite, pXist5′, and pTsx cells) or a pTsx probe (for pSx7 cells). The pSx7 partially overlaps the p3.7 and pXite transgenes, but the small overlap makes the signal dim and discernible from the X. For πJL1.4.1, the transgene was labeled green (pSx9 Xist fragment) and the X labeled red (pTsx probe). The KS test compared data sets from day 0 versus day 4. n=170 to 234.

[0072] FIGS. 18 A-D show de novo X-A pairing inhibits X-X pairing. FIG. 18A is a series of graphs showing the disruption of X-X pairing in female transgenic cells. n=177 to 221. FIG. 18B shows the KS test comparing data sets from day 0 versus day 2 and from day 0 versus day 4. FIG. 18C is a graph showing the average frequency of X-X pairing with standard deviations from three experiments. FIG. 18D is a model showing X-X pairing is required for counting/choice. Allelic crosstalking results in asymmetric chromosome marking (yellow circles, blocked Xic; red circle, induced Xic) and mutually exclusive designation of Xₐ and Xᵢ. Blue lines, Xist RNA. Ectopic Tsix/Xite transgenes (Tg-Xic) inhibit XCI by titrating away X-X interactions. Loss of pairing in Tsix X^{Δ}X^{Δ} causes aberrant counting/choice.

[0073] FIG. 19 is a series of graphs and images showing X-X proximity pairs represent X-chromosome doublets in XX cells rather than sister chromatids of a single X in XO cells. Xic labelling (Tsix probe, red) and X-painting (FITC, green) of WT female ES cells demonstrates that X-X proximity pairs represent two distinct Xs in XX cells rather than sister chromatids of a single X in XO cells. The paired Xs show X-paint signals that occupy twice the nuclear area as single Xs. The X-X distribution profile is shown on the right with KS testing (P) comparing d4 against d0.

[0074] FIG. 20 is a series of graphs showing proximity-pairing is specific to the X-chromosome. Distribution profiles of Chr. 1 centromere (1C) and Chr.2 Abca2 gene during ES cell differentiation.

[0075] FIGS. 21A-C show proximity-pairing is specific to the Xic. FIG. 21A is a series of images showing DNA FISH of XC and Tsix with Tsix signals being apart (left) or paired (right). FIG. 21B is a series of graphs showing the distribution profile of flanking X-linked probes on d4. FIG. 21C is a series of graphs showing the cumulative frequency curves of X-linked probe between d0 and d6. KS test, P=significance of the difference when tested against d0.

[0076] FIGS. 22A-B are a series of images and graphs showing the temporal delineation of proximity-pairing using Ezh2 (FIG. 22A) and H3-3meK27 (FIG. 22B) as markers. ImmunoFISH used an Xic probe (green) in combination with either an Ezh2 or H3-3meK27 antibody (red). X-X distribution profiles are shown on the right.

[0077] FIG. 23 is a series of graphs showing X-X distribution profiles of mutant Tsix and Xite ES cells on d0 to d6. These graphs show Tsix and Xite mediate pairing.

[0078] FIG. 24 is a diagram of the β-globin locus with 3C primers shown by arrowheads and BamHI sites shown by arrows.

[0079] FIG. 25 is a series of graphs showing the X-X distribution profiles of indicated transgenic female ES cells from d0 to d4.

[0080] FIG. 26 is a series of images showing female transgenic ES cells maintain the undifferentiated morphology even on day 5 under differentiation conditions. The ns11(vector) and ns82 (Tsix promoter) were used as negative controls.

[0081] FIG. 27 is a series of images showing male transgenic ES cells do not show the same undifferentiated morphology under differentiation conditions seen for female ES cells.

[0082] FIG. 28 is a series of graphs showing pairing between all subfragments of Tsix and Xite, except for ns82 (Tsix promoter only) in ES cells. The ectopic X-A pairing inhibits endogenous X-X pairing.

[0083] FIGS. 29A-I show a heterozygous deletion of the Tsix promoter exerts no obvious effect on choice. FIG. 29A is a schematic of the targeting scheme for deletion of Tsix promoter. RV: EcoRV, B: BamHI. Position of probes 1 and 2 are indicated by numbered grey rectangles. Filled and open triangles represent FRT and LoxP sites, respectively. FIG. 29B shows a Southern blot analysis of genomic DNAs from female clones digested with EcoRV and probed with Probe 1. FIG. 29C shows a Southern blot analysis of genomic DNAs from M. musculus (129) or M. castaneus (cast) liver, and DNA from wild-type or targeted female ES cells, digested with BamHI and probed with Probe 2. FIG. 29D shows a Southern blot analysis of genomic DNAs from male clones digested with EcoRV and probed with Probe 1. FIG. 29E shows allele-specific analysis of Tsix expression at two positions based on ScrFI and MnII SNPs. FIG. 29F is a series of graphs showing real-time RT-PCR quantitation of Tsix expression in male cells. All samples were normalized to the internal control, Rpo2. Error bars indicate one standard deviation. FIG. 29G shows allele-specific RT-PCR for Xist (top) or Mecp2 (bottom) in female cell lines. Days of differentiation are as indicated. FIG. 29H shows fraction of Tsix RNA from the 129 allele in the experiment shown in FIG. 29G. FIG. 29I is a series of images showing RNA/DNA FISH on day 8 female ΔPneo cells. Xist RNA, green; Neo DNA, red. The percentage of each XCI pattern is indicated to the right of the panels (number of nuclei sampled in parentheses). n=138.

[0084] FIGS. 30 A-E show DXPas34 is conserved and bears resemblance to transposable elements (TEs). FIG. 30A is a dot-plot of mouse x-axis, 138,745-141,000 of AJ421479) vs. rat (y-axis, 51,001-53,300 of N_W048043) sequences at DXPas34. Positions of different repeat clusters are as shown. FIG. 30B shows the consensus repeat sequences as determined for each species. Human repeat A, SEQ ID NO: 40; mouse repeat A1, SEQ ID NO: 28; mouse repeat A2, SEQ ID NO: 29; mouse repeat B, SEQ ID NO: 30; rat repeat A, SEQ ID NO: 31; rat repeat B, SEQ ID NO: 32. FIG. 30C shows a dot-plot analysis of mouse (x-axis, bp134,001-141,000 of AJ421479) vs. human (y-axis, bp 11,328,000-11,352,000 of NT_{—}011669). Regions 2 and 3 are as marked (Lee et al., Cell 99:47-57 (1999)). 14 kb insertion in human sequence, along with region containing A repeats (grey box), is marked on y-axis. FIG. 30D shows a schematic of human A-repeat region showing positions of ERV/LTRs and SINEs (light and dark grey boxes) and A-repeat units (black triangles). Sequence of a representative ERV/LTR (bp 11345000-11348700 of NT_{—}011669; SEQ ID NO: 43) is shown, with A-repeats boxed. FIG. 30E shows the human repeat A (SEQ ID NO: 40) perfectly matches the corresponding region of the human HERVL repeat (SEQ ID NO: 44). Mouse DXPas34 (A1 motif) (SEQ ID NO: 28) also shows excellent alignment with human HERVL (4 mismatches out of 27 bp) and mouse MERVL/RatERVL (5 mismatches) (SEQ ID NO: 45).

[0085] FIGS. 31A-E show DXPas34 displays bidirectional promoter activity. FIG. 31A is a schematic of Tsix 5′ region showing DXPas34, positions of primer pairs used for strand-specific RT-PCR (asterisk numbers), and relevant restriction sites (A: Age I, S: SalI, M: Mlul). Fragments of DXPas34 used in luciferase assays as shown. Luciferase activity was normalized to β-galactosidase and then to a Tsix promoter luciferase construct. Error bars indicate one standard error. FIG. 31B shows the results of strand-specific RT-PCR of Rrm2 or Tsix 5′ region as shown in FIG. 31A. Sense (s) and antisense (as) strands are indicated above each column. FIG. 31C shows the results of 5′ RACE to detect Dxpas-r. M: marker 5′: 5′ RACE amplification products. Sequence of a representative DXPas34 block with major and minor start sites indicated by heavy and light arrows (SEQ ID NO: 46). Repeat A1 units containing start sites are underlined. FIG. 31D shows the results of RT-PCR of ES cells treated with tagetin (T) for 8 hours or α-amanitin for 4 or 8 hours (α4 and α8, respectively). Tsix and Dxpas-r were detected at position 2. 18S RNA (a Pol I transcript) was amplified in parallel as a loading control. FIG. 31E shows the results of RT-PCR of RNAs from indicated samples were amplified at position 2.

[0086] FIGS. 32 A-F show targeted deletion of DXPas34 diminishes Tsix transcription. FIG. 32A is a diagram showing the targeting scheme for deletion of DXPas34. Three previous alleles of this locus are shown above in grey (Debrand et al., Mol. Cell. Biol. 19:8513-8525 (1999); Lee et al., Cell 99:47-57 (1999); Sado et al., Development 128 1275-1286 (2001)). Relevant restriction sites are S: StuI, B: BamHI, RV: EcoRV. Probes are indicated by grey boxes. FIG. 32B shows genomic DNAs from female and male clones digested with StuI and detected with Probe 1. FIG. 32C shows genomic DNAs digested with EcoRV and detected with Probe 2. FIG. 32D shows female genomic DNAs digested with BamHI and probed with Probe 2 to determine which allele was targeted. FIG. 32F is an autoradiogram showing quantitative real-time RT-PCR analysis in undifferentiated male cells at positions A and B (as shown in FIG. 29E). FIG. 32 is a series of graphs showing the results of strand-specific RT-PCR analysis on male cells of the indicated genotype as described in FIGS. 31B-E. Position 2 is within the ΔDXPas34 deleted region and is therefore omitted from analysis.

[0087] FIGS. 33A-C show deletion of DXPas34 leads to nonrandom XCI patterns. FIG. 33A is a series of images showing RNA/DNA FISH on day 12 female ΔDXPas34 cells. Xist RNA, green; DXPas34 DNA, red. The percentage of each XCI pattern is indicated to the right of the panels (number of nuclei in parentheses). n=48. FIGS. 33B-33C show allele-specific RT-PCR analysis for Xist (FIG. 33B) or Mecp2 (FIG. 33C) as described in FIG. 29G. Note: The ΔDXPas34 experiments were carried out in parallel with cell lines presented in FIG. 29G; therefore, the controls autoradiographs are identical. Charts indicate percent of transcripts from 129 chromosome at day 12 for multiple differentiation experiments. Open circles represent individual experiments; filled circles represent the mean with one standard deviation indicated by the error bars. Pairwise comparisons of samples were performed by student t-tests as shown (bottom).

[0088] FIGS. 34A and B show deletion of DXPas34 de-represses Tsix late in differentiation. FIG. 34A shows allele-specific Tsix RT-PCR at ScrFI polymorphism of wildtype and ΔDXPas34 females during differentiation. FIG. 34B is a series of graphs showing the allelic fraction of Tsix RNA from the 129 (left panel) or castaneus (right panel) during cell differentiation. Error bars indicate one standard deviation.

[0089] FIG. 35A is a schematic showing a 3-step model for how DXPas34 regulates Tsix expression during cell differentiation, where two enhancers and two functions of DXPas34 act in sequence to control distinct aspects of Tsix dynamics. This model proposes that the bipartite enhancer acts in pre-XCI cells to achieve biallelic Tsix expression. The Xite enhancer may act during this time as well, but it is not absolutely required until the onset of XCI, when its action enables the persistence of Tsix expression on the future Xₐ. Following the establishment of XCI, stable repression of Tsix requires the late-stage negative function of DXPas34. In this model, the antiparallel transcription of Dxpas-r leads to repression of Tsix, possibly through a similar antisense mechanism. FIG. 35B is a schematic showing a model for how Tsix co-opted retrotransposable elements for its regulation. A retrotransposon (rTE) fortuitously inserted into the Xic near the 5′ end of the primordial Tsix gene some 80-200 million years ago. With each TE being a self-sufficient gene expression module containing promoters, enhancers, and insulators, the insertion introduced a repertoire of regulatory elements that were co-opted to regulate Tsix (e.g., CTCF sites, Tsix enhancer, and alternative promoters (Chao et al., Science 295:345-347 (2002); Stavropoulos et al., Mol. Cell. Biol. 25:2757-2769 (2005)). Over time, the rTE might lost nearly all of its original sequences, except for those retained for the regulation of Tsix. The retained elements were repeatedly re-duplicated during this process to yield present-day DXPas34.

[0090] FIG. 36 shows a northern blot analyses for the presence of small RNAs at the within Xite, the left one probed with a let7 probe and the right one probed with a Xite probe as indicated in the schematic. Small RNAs within Xite are indicated with arrows. The let7b blot is a positive control that shows that the known mRNA (let7b) can be detected. Note for the Xite panel, the small RNAs can be detected using both sense and antisense probes indicating that the small RNAs are double stranded. Cell lines shown are those from Lee, Science (2005) supra, and Xu et al. Science (2006) supra, and Ogawa and Lee Mol. Cell. (2003) supra. Briefly, J1, wildtype male ES; 16.7, wildtype female ES; J1-ΔCpG is Tsix-deleted male ES; 16.7 Δ/Δ is Tsix−/− female ES; ΔL(Xite) is a 12.5 kb deletion of Xite; female-Tsix3.7 is transgenic female ES with 3.7 kb Tsix sequence deleted in the Tsix-allele; Female-Xite is transgenic female ES with 5.6 Xite transgene. Lanes 0, 4, 10 refer to days of cell differentiation for each cell line.

### DETAILED DESCRIPTION

[0091] Stem cells have enormous clinical potential because of their ability to self-renew indefinitely and to differentiate into a large number of cells and tissue types. Their potential use in regenerative therapy and gene therapy is almost limitless but is dependent on the ability to control the otherwise irreversible process of differentiation.

[0092] The present invention features a method for controlling such differentiation by introducing Xic, Tsix, Xite, or Tsix/Xite transgenes or fragments thereof, or small RNA derived from Xic, Tsix, Xite, or Tsix/Xite to inhibit differentiation. This allows sufficient time to manipulate the stem cells as desired for therapeutic or research purposes. Subsequent removal of the transgene allows for the induction of differentiation of the stem cells into the desired cell or tissue type, and administration to a patient.

### Transgenes

[0093] The present invention is based on the discovery that the introduction of a transgene having Xic, Tsix, Xite, or Tsix/Xite sequences, or fragments thereof, into the stem cell inhibits differentiation. Transgenes useful in the invention can include any Xic, Tsix, or Xite nucleic acid sequences or Tsix/Xite nucleic acid sequences having a part or all of both Tsix and Xite sequences.

[0094] Tsix and Xite are non-coding cis-acting genes found in the master regulatory region called the X-inactivation center (Xic). This region contains a number of unusual noncoding genes, including Xist, Tsix, and Xite, that work together to ensure that XCI takes place only in the XX female, only on one chromosome, and in a developmentally specific manner. Each of these genes makes RNA instead of protein. Xist is made only from the future inactive X and makes a 20 kb RNA that “coats” the inactive X, thereby initiating the process of gene silencing. Tsix is the antisense regulator of Xist and acts by preventing the spread of Xist RNA along the X-chromosome. Thus, Tsix designates the future active X. Xite works together with Tsix to ensure the active state of the X. Xite makes a series of intergenic RNAs and assumes special chromatin conformation. Its action enhances the expression of antisense Tsix, thereby synergizing with Tsix to designate the future active X. In addition, Tsix and Xite function together to regulate the counting and choice aspects of XCI through X-X pairing as described herein.

[0095] Transgenes having Xic, Tsix, Xite, or Tsix/Xite sequences, or fragments or combinations thereof, are useful in the methods of the invention to delay or control differentiation. It should be noted that although preferred fragments within the Xic, Tsix, Xite, or Tsix/Xite sequences are specified, any nucleic acid sequence within this region is useful in the methods of the invention. The data presented herein identifying the functional redundancy of this region with respect to blocking X-X pairing, counting and cell differentiation supports the use of any fragment from this region. For example, any sequence from this region that can inhibit X-X pairing (e.g., by inducing de novo X-transgene pairing) can be used to block differentiation.

[0096] Non-limiting examples of preferred Xic transgene sequences include the mouse Xic (SEQ ID NO: 1) or the human syntenic equivalent (SEQ ID NO: 39), πJL2 (SEQ ID NO: 2), and πJL3 (SEQ ID NO: 3).

[0097] Non-limiting examples of preferred Tsix transgene sequences include nucleic acid sequences at least substantially identical to the full-length mouse Tsix gene (SEQ ID NO: 6), or fragments thereof, and nucleic acids at least substantially identical to fragments of the mouse Tsix gene such as the highly conserved region (SEQ ID NO: 5), pCC3 (SEQ ID NO: 9), p3.7 (SEQ ID NO: 10), DxPas34 (SEQ ID NO: 12), the 34 bp repeat of DxPas34 (SEQ ID NO: 13), the 68 bp repeat of DxPas34 (SEQ ID NO: 14), ns25 (SEQ ID NO: 21), ns41 (SEQ ID NO: 22), ns82 (SEQ ID NO: 23), mouse repeat A1 (SEQ ID NO: 28), mouse repeat A2 (SEQ ID NO: 29), mouse repeat B (SEQ ID NO: 30), rat repeat A (SEQ ID NO: 31), and rat repeat B (SEQ ID NO: 32). Another preferred Tsix transgene sequence includes at least 2 copies of the 34 bp or 68 bp DxPas34 repeat (SEQ ID NOs: 13 or 14, respectively), as well as at least 3 copies, at least 4 copies, and at least 5 copies or more. Additional preferred Tsix transgene sequences include nucleic acid sequences at least substantially identical to the human syntenic equivalents: the full-length human Tsix gene (SEQ ID NO: 36), the human repeat A (SEQ ID NO: 40), or any fragments thereof, and nucleic acid sequences substantially identical to any mammalian (e.g., human, primate, bovine, ovine, feline, and canine) homologues, orthologues, paralogues, species variants, or syntenic variants of the mouse Tsix sequence (SEQ ID NO: 6), or fragments thereof.

[0098] As indicated above for SEQ ID NOs: 13 and 14, it should be noted that for any of the fragments, particularly the smaller fragments such as SEQ ID NOs: 28, 29, 30, 31, 32, and 40, the transgene can include multiple copies of the sequences, for example, in tandem array (e.g., at least 2 copies, at least 3 copies, at least 4 copies, and at least 5 copies or more). The mouse repeat A1 (SEQ ID NO: 28), mouse repeat A2 (SEQ ID NO: 29), mouse repeat B (SEQ ID NO: 30), rat repeat A (SEQ ID NO: 31), rat repeat B (SEQ ID NO: 32), and human repeat A (SEQ ID NO: 40) are all part of the DXPas34 region and include the canonical sequences required for binding the transcription factor, CTCF. These small repeat units of DxPas and any ERV derived multimer of the canonical sequences provided in FIG. 30B are therefore included as preferred Tsix transgene sequences that are useful in the methods of the invention.

[0099] Non-limiting examples of preferred Xite transgene sequences include nucleic acid sequences at least substantially identical to the full-length mouse Xite gene (SEQ ID NO: 15), or fragments thereof, and nucleic acids at least substantially identical to fragments of the mouse Xite gene such as pXite (SEQ ID NO: 16), Xite Enhancer (SEQ ID NO: 17), ns130 (SEQ ID NO: 24), ns135 (SEQ ID NO: 25), ns155 (SEQ ID NO: 26), ns132 (SEQ ID NO: 27). Additional non-limiting examples of preferred Xite transgene sequences include nucleic acid sequences substantially identical to the human Xite gene (SEQ ID NO: 38), or fragments thereof, and nucleic acid sequences substantially identical to any mammalian (e.g., human, primate, bovine, ovine, feline, and canine) homologues, orthologues, paralogues, species variants, or syntenic variants of the mouse Xite sequence (SEQ ID NO: 15), or fragments thereof.

[0100] Sequences that include a region that spans all or a portion of both genes or the intervening region between the two genes are known as Tsix/Xite transgene and can also be used as transgenes in the methods of the invention. Non-limiting examples include a nucleic acid having the entire critical region spanning both genes of the mouse chromosome, pSxn (SEQ ID NO: 4), pCC4 (SEQ ID NO: 11), and the bipartite enhancer (SEQ ID NO: 19). Additional preferred Tsix/Xite transgene sequences include nucleic acid sequence substantially identical to the intervening region between the human syntenic equivalents of Tsix (SEQ ID NO: 36) and Xite (SEQ ID NO: 38). One example of a human Tsix/Xite transgene sequence is pSxN human (SEQ ID NO: 37).

[0101] The preferred fragments are shown in Tables 1 and 2, below. Note that because the fragments are non-coding regions, the exact start and end of the sequence is of little importance. Therefore, for all fragments, the size and nucleotide sequences are approximate values and can be altered by 1, 2, 5, 10, 20, 30, 40, 50, 100, 150, 200, 250, 500, 750, 1000 or more nucleotides. Also note that all sequences are presented in a 5′ to 3′ orientation.

TABLE 1

Mouse and Rat Sequences.

| SEQ | | | | |
|---|---|---|---|---|
| ID | | Length | | |
| NO | Name | (approx.) | Nucleotide Sequence | Reference Figure |
| 1 | Xic | 100 kB | nt 80,000 to 180,000 of GenBank AJ421479 | FIG. 4A |
| 2 | πJL2 | 80 kB | Xist + 30 kB up and downstream | FIG. 9A |
| 3 | πJL3 | 80 kB | Xist + 60 kB downstream | FIG. 9A |
| 4 | pSxN | 19.5 kB | see FIGS. 3A and 3B | FIGS. 1, 3A and 3B |
| 5 | Highly conserved | 5 kB | nt 1-5074 of SEQ ID NO: 4 (see FIG. 3B) | FIG. 3A, 3B |
| 6 | Full length Tsix | 40 kB | FIGs 5, nt 157, 186-104,000 of AJ421479 | FIG. 5 |
| 7 | pXist 3′ | 4.9 kB | Not shown | FIG. 1 |
| 8 | pXist 5′ | 4.8 kB | Not shown | FIG. 1 |
| 9 | pCC3 | 4.3 kB | nt 3079-7395 of SEQ ID NO: 4 (see FIG. 3B) | FIGS. 1, 3A and 3B |
| 10 | p3.7 | 3.7 kB | nt 5074-8768 of SEQ ID NO: 4 (see FIG. 3B) | FIGS. 1, 2, 3A and |
| | | | | 3B |
| 11 | pCC4 | 5.9 kB | nt 7395-13274 of SEQ ID NO: 4 (see FIG. 3B) | FIGS. 1, 2, 3A and |
| | | | | 3B |
| 12 | DxPas34 | 1.5 kB | nt 5073-6635 of SEQ ID NO: 4 (see FIG. 3B) | FIGS. 1, 3A and 3B |
| 13 | 34 bp repeat | 34 | Throughout nt 5073-6635 of SEQ ID NO: 4 | FIG. 3B, 4 |
| 14 | 68 bp repeat | 68 | Throughout nt 5073-6635 of SEQ ID NO: 4 | FIGS. 3B, 4 |
| 15 | Full length Xite | 20 kB | FIG. 7, nt 157, 186-104,000 of AJ421479 | FIG. 7 |
| 16 | pXite | 5.6 kB | nt 13887-19467 of SEQ ID NO: 4 (see FIG. 3B) | FIGS. 1, 2, 3A and |
| | | | | 3B |
| 17 | Xite Enhancer | 1.2 kB | nt 16360-17582 of SEQ ID NO: 4 (see FIG. 3B) | FIGS. 1, 3A and 3B |
| 18 | pTsx | 10.8 kB | nt 41, 347-52, 236 of GenBank X99946 | FIG. 1 |
| | | | (SEQ ID NO: 91) | |
| 19 | Bipartite | 10.2 kB | nt 3079-12274 of SEQ ID NO: 4 (see FIG., 3B) | FIGS. 3A, 3B |
| 20 | Full length Xist | 23 kB | FIG. 5, nt 106, 296-129, 140 of AJ421479 | FIG. 6 |
| 21 | ns25 (DXPas34) | 1.6 kB | nt 5485 (SalI) to 7177 (SmaI) of SEQ ID NO: 4 | FIGS. 1, 2, and 3B |
| | | | (see FIG. 3B) | |
| 22 | ns41 | 2.4 kB | nt 3079 (BamHI) to 5486 (SalI) of SEQ ID NO: 4 | FIGS. 1, 2, and 3B |
| | | | (see FIG. 3B) | |
| 23 | ns82 (Tsix | 220 bp | nt 7177 (SmaI) to 7398 (BamHI) of SEQ ID NO: 4 | FIGS. 1, 2 and 3B |
| | promoter) | | (see FIG. 3B) | |
| 24 | ns130 | 1.8 kB | nt 17580 to 19467 of SEQ ID NO: 4 (see FIG.3B) | FIGS. 1, 2 and 3B |
| 25 | ns135 (1.2 kb | 1.2 kB | nt 16360 (StuI) to 17583 (XhoI) of SEQ ID NO: 4 | FIGS. 1, 2, and 3B |
| | Xite enhancer | | (see FIG. 3B) | |
| 26 | ns155 (equivalent | 1.2 kb | nt 16360 (StuI) to 17583 (XhoI) of SEQ ID NO: 4 | FIGS. 1 and 3B |
| | to ns135 | | (see FIG. 3B) | |
| 27 | ns132 | 2.5 kB | nt 13883 (AvrII) to 16363 (StuI) of SEQ ID NO: 4 | FIGS. 1, 2, and 3B |
| | | | (see FIG. 3B) | |
| 28 | Mouse repeat A1 | 34 | GTGAYNNCCCAGRTCCCCGGTGGCAGGCATTTTA | FIG. 30B |
| 29 | Mouse repeat A2 | 32 | NNNNTNNNTNCNNNNNNNNNGCANNCATTTTA | FIG. 30B |
| 30 | Mouse repeat B | 30 | CAAGCACTTAGCCAYCGCYCCACTGTCCCG | FIG. 30B |
| 31 | Rat repeat A | 32 | NNYAYANNYCNNNNNNNYNNNCAGNNATTTTA | FIG. 30B |
| 32 | Rat repeat B | 31 | CARGCACNTYAGCCACCTCNCCACTGWCCCG | FIG. 30B |

“N” refers to any nucleotide
“Y” refers to either pyrimidine
“R” refers to either purine
* Note that the sequences as shown in FIG. 5 and GenBank Accession No. AJ421479 have a 3 kB deletion in the Zeste repeat region. This region cannot be sequenced. These coordinates are based on the sequence provided and do not include the 3 kB gap in the sequence.

TABLE 2
Human Sequences

| SEQ ID NO | Name | Length (approximate) | Nucleotide Sequence (approximate) |
|---|---|---|---|
| 35 | Xist | 32 kB | 11,390,576-11,358,483 of NT_011669 |
| 36 | Tsix | 64 kB | 11,329,000-11,393,000 of NT_011669 |
| 37 | pSxN human | 50-60 kB | 11,358,483-11,300,000 of NT_011669 |
| 38 | Xite | 13 kB | 11,320,000-11,333,000 of NT_011669 |
| 39 | Xic | 80 kB | 11,320,000-11,450,000 of NT_011669 |
| 40 | Repeat A | 16 bp | GCNNCNNGGNGGCAGG, FIG. 30B |

[0102] For any of the Xic, Tsix, Xite, or combined Tsix/Xite transgene sequences, it will be understood that mammalian (e.g., human, mouse, primate, bovine, ovine, feline, and canine) homologues, orthologues, paralogues, species variants, or syntenic variants are also included. For example, the human syntenic region includes approximately 15 megabases of contiguous human sequence on the X chromosome (GenBank Accession Number NT_{—}011669, SEQ ID NO: 34). These 15 megabases of sequence include the human Xic region as well as additional sequences on both ends of the Xic region. The syntenic equivalent of Xist is found at approximately nucleotides 11,390,576 to 11,358,483 (SEQ ID NO: 35) of GenBank Accession Number NT_{—}011669. The critical region including Tsix and Xite in the human sequence is predicted to be from approximately nucleotides 11,358,483 to nucleotide 11,300,000 (pSxN, human, SEQ ID NO: 37) of GenBank Accession Number NT_{—}011669. The syntenic equivalent of Tsix (SEQ ID NO: 36) is found at approximately nucleotides 11,329,000-11,393,000 and the syntenic equivalent of Xite (SEQ ID NO: 38) is found at approximately nucleotides 11,320,000 to 11,333,000 of NT_{—}011669. Transgenes that are useful in the methods of the invention can be identified using assays for the ability of the transgene to block X chromosome inactivation or differentiation. Such assays are known in the art and examples are described herein.

RNA interference (RNAi)

[0103] The present invention is based on the discovery that disruptions in the XCI process can block differentiation. One method for interfering with XCI involves the use of small RNA molecules, such as siRNA, directed to Xic, Tsix, Xite, or Xist that are introduced into stem cells and prevent the stem cells from undergoing X chromosome inactivation and from differentiating in culture. The use of such small RNA molecules circumvents the need for removal of the transgene because the small RNA molecules have a limited half-life and will naturally degrade.

[0104] RNAi is a form of post-transcriptional gene silencing initiated by the introduction of double-stranded RNA (dsRNA). Short 15 to 32 nucleotide double-stranded RNAs, known generally as “siRNAs,” “small RNAs,” or “microRNAs” are effective at down-regulating gene expression in nematodes (Zamore et al., Cell 101: 25-33) and in mammalian tissue culture cell lines (Elbashir et al., Nature 411:494-498, 2001, hereby incorporated by reference). The further therapeutic effectiveness of this approach in mammals was demonstrated in vivo by McCaffrey et al. (Nature 418:38-39. 2002). The small RNAs are at least 15 nucleotides, preferably, 17, 18, 19, 20, 21, 22, 23, 24, 25, 26, 27, 28, 29, 30, 31, 32, 33, 34, 35, nucleotides in length and even up to 50 or 100 nucleotides in length (inclusive of all integers in between). Such small RNAs that are substantially identical to or complementary to any region of Xic, Tsix, Xite, or Xist, are included in the invention based on the discovery that Tsix, Xite, and also Xist elements are transcribed and portions of these regions exhibit bidirectional transcription, with the potential therefore for the formation of double-stranded RNAs which may then be subject to the RNAi pathway. In fact, small non-coding RNAs (ncRNAs) ranging from less than 25 nt to approximately 100 nt in size, corresponding to regions of Xite have been identified from both the sense and antisense strands (see FIG. 36). Furthermore, transcription or the ncRNA products of Xic, Tsix Xite, or Tsix/Xite, or both, have been shown to be required for pairing during XCI.

[0105] Therefore, the invention includes any small RNA substantially identical to at least 15 nucleotides, preferably, 17, 18, 19, 20, 21, 22, 23, 24, 25, 26, 27, 28, 29, 30, 31, 32, 33, 34, or 35, nucleotides in length and even up to 50 or 100 nucleotides in length (inclusive of all integers in between) of any region of Xic, Tsix, Xite, or Xist, preferably the regions described herein and shown in Tables 1 and 2. The invention also includes the use of such small RNA molecules to block differentiation. It should be noted that, as described below, longer dsRNA fragments can be used that are processed into such small RNAs. Useful small RNAs can be identified by their ability to block differentiation, block pairing, or block XCI using the methods described herein. Small RNAs can also include short hairpin RNAs in which both strands of an siRNA duplex are included within a single RNA molecule.

[0106] The specific requirements and modifications of small RNA are known in the art and are described, for example, in PCT Publication No. WO01/75164, and U.S. Application Publication Numbers 20060134787, 20050153918, 20050058982, 20050037988, and 20040203145, the relevant portions of which are herein incorporated by reference. In particular embodiments, siRNAs can be synthesized or generated by processing longer double-stranded RNAs, for example, in the presence of the enzyme dicer under conditions in which the dsRNA is processed to RNA molecules of about 17 to about 26 nucleotides. siRNAs can also be generated by expression of the corresponding DNA fragment (e.g., a hairpin DNA construct). Generally, the siRNA has a characteristic 2- to 3-nucleotide 3′ overhanging ends, preferably these are (2′-deoxy) thymidine or uracil. The siRNAs typically comprise a 3′ hydroxyl group. In some embodiments, single stranded siRNAs or blunt ended dsRNA are used. In order to further enhance the stability of the RNA, the 3′ overhangs are stabilized against degradation. In one embodiment, the RNA is stabilized by including purine nucleotides, such as adenosine or guanosine. Alternatively, substitution of pyrimidine nucleotides by modified analogs e.g. substitution of uridine 2-nucleotide overhangs by (2′-deoxy)thymide is tolerated and does not affect the efficiency of RNAi. The absence of a 2′ hydroxyl group significantly enhances the nuclease resistance of the overhang in tissue culture medium.

[0107] siRNA molecules can be obtained through a variety of protocols including chemical synthesis or recombinant production using a Drosophila in vitro system. They can be commercially obtained from companies such as Dharmacon Research Inc. or Xeragon Inc., or they can be synthesized using commercially available kits such as the Silencer™ siRNA Construction Kit from Ambion (catalog number 1620) or HiScribe™ RNAi Transcription Kit from New England BioLabs (catalog number E2000S).

[0108] Alternatively siRNA can be prepared using standard procedures for in vitro transcription of RNA and dsRNA annealing procedures such as those described in Elbashir et al. (Genes & Dev., 15:188-200, 2001), Girard et al., (Nature Jun. 4, 2006, e-publication ahead of print), Aravin et al., (Nature Jun. 4, 2006, e-publication ahead of print), Grivna et al., (Genes Dev. Jun. 9, 2006, e-publication ahead of print), and Lau et al., (Science Jun. 15, 2006, e-publication ahead of print). siRNAs are also obtained by incubation of dsRNA that corresponds to a sequence of the target gene in a cell-free Drosophila lysate from syncytial blastoderm Drosophila embryos under conditions in which the dsRNA is processed to generate siRNAs of about 21 to about 23 nucleotides, which are then isolated using techniques known to those of skill in the art. For example, gel electrophoresis can be used to separate the 21-23 nt RNAs and the RNAs can then be eluted from the gel slices. In addition, chromatography (e.g. size exclusion chromatography), glycerol gradient centrifugation, and affinity purification with antibody can be used to isolate the small RNAs.

[0109] siRNAs specific to the Tsix, Xite, Xist or Xic regions can also be obtained from natural sources. For example, as shown in FIG. 36, small RNAs are endogenously produced from the various sites within the mouse XIC. Such small RNAs can be purified as described above and used in the methods of the invention.

[0110] Short hairpin RNAs (shRNAs), as described in Yu et al. or Paddison et al. (Proc. Natl. Acad. Sci. USA, 99:6047-6052, 2002; Genes & Dev, 16:948-958, 2002; incorporated herein by reference), can also be used in the methods of the invention. shRNAs are designed such that both the sense and antisense strands are included within a single RNA molecule and connected by a loop of nucleotides (3 or more). shRNAs can be synthesized and purified using standard in vitro T7 transcription synthesis as described above and in Yu et al. (supra). shRNAs can also be subcloned into an expression vector that has the mouse U6 promoter sequences which can then be transfected into cells and used for in vivo expression of the shRNA.

[0111] A variety of methods are available for transfection, or introduction, of dsRNA into mammalian cells. For example, there are several commercially available transfection reagents useful for lipid-based transfection of siRNAs including but not limited to: TransIT-TKO™ (Mirus, Cat. #MIR 2150), Transmessenger™ (Qiagen, Cat. #301525), Oligofectamine™ and Lipofectamine™ (Invitrogen, Cat. #MIR 12252-011 and Cat. #13778-075), siPORT™ (Ambion, Cat. #1631), DharmaFECT™ (Fisher Scientific, Cat. #T-2001-01). Agents are also commercially available for electroporation-based methods for transfection of siRNA, such as siPORTer™ (Ambion Inc. Cat. #1629). Microinjection techniques can also be used. The small RNA can also be transcribed from an expression construct introduced into the cells, where the expression construct includes a coding sequence for transcribing the small RNA operably linked to one or more transcriptional regulatory sequences. Where desired, plasmids, vectors, or viral vectors can also be used for the delivery of dsRNA or siRNA and such vectors are known in the art. Protocols for each transfection reagent are available from the manufacturer. Additional methods are known in the art and are described, for example in U.S. Patent Application Publication No. 20060058255.

[0112] The concentration of dsRNA used for each target and each cell line varies and can be determined by the skilled artisan. If desired, cells can be transfected multiple times, using multiple small RNAs to optimize the gene-silencing effect.

### Cells

[0113] Embryonic stem cells (ES), derived from the inner cell mass of preimplantation embryos, have been recognized as the most pluripotent stem cell population and are therefore the preferred cell for the methods of the invention. These cells are capable of unlimited proliferation in vitro, while maintaining the capacity for differentiation into a wide variety of somatic and extra-embryonic tissues. ES cells can be male (XY) or female (XX); female ES cells are preferred.

[0114] Multipotent, adult stem cells can also be used in the methods of the invention. Preferred adult stem cells include hematopoietic stem cells (HSC), which can proliferate and differentiate throughout life to produce lymphoid and myeloid cell types; bone marrow-derived stem cells (BMSC), which can differentiate into various cell types including adipocytes, chondrocytes, osteocytes, hepatocytes, cardiomyocytes and neurons; and neural stem cells (NSC), which can differentiate into astrocytes, neurons, and oligodendrocytes. Multipotent stem cells derived from epithelial and adipose tissues and umbilical cord blood cells can also be used in the methods of the invention.

[0115] Stem cells can be derived from any mammal including, but not limited to, mouse, human, and primates. Preferred mouse strains for stem cell preparation include 129, C57BL/6, and a hybrid strain (Brook et al., Proc. Natl. Acad. Sci. U.S.A. 94:5709-5712 (1997), Baharvand et al., In Vitro Cell Dev. Biol. Anim. 40:76-81 (2004)). Methods for preparing mouse, human, or primate stem cells are known in the art and are described, for example, in Nagy et al., Manipulating the mouse embryo: A laboratory manual, 3^{rd} ed., Cold Spring Harbor Laboratory Press (2002); Thomson et al., Science 282:1145-1147 (1998), Marshall et al., Methods Mol. Biol. 158:11-18 (2001); Thomson et al., Trends Biotechnol. 18:53-57 (2000); Jones et al., Semin. Reprod. Med. 18:219-223 (2000); Voss et al., Exp. Cell Res. 230:45-49 (1997); and Odorico et al., Stem Cells 19:193-204 (2001).

[0116] ES cells can be directly derived from the blastocyst or any other early stage of development, or can be a “cloned” stem cell line derived from somatic nuclear transfer and other similar procedures. General methods for culturing mouse, human, or primate ES cells from a blastocyst can be found in Appendix C of the NIH report on stem cells entitled Stem Cells: Scientific Progress and Future Research Directions (this report can be found online at the NIH Stem Cell Information website, http://stemcells.nih.gov/info/scireport). For example, in the first step, the inner cell mass of a preimplantation blastocyst is removed from the trophectoderm that surrounds it. (For cultures of human ES cells, blastocysts are generated by in vitro fertilization and donated for research.) The small plastic culture dishes used to grow the cells contain growth medium supplemented with fetal calf serum, and are sometimes coated with a “feeder” layer of nondividing cells. The feeder cells are often mouse embryonic fibroblast (MEF) cells that have been chemically inactivated so they will not divide. Additional reagents, such as the cytokine leukemia inhibitory factor (LIF), can also be added to the culture medium for mouse ES cells. Second, after several days to a week, proliferating colonies of cells are removed and dispersed into new culture dishes, each of which may or may not contain an MEF feeder layer. If the cells are to be used to human therapeutic purposes, it is preferable that the MEF feeder layer is not included. Under these in vitro conditions, the ES cells aggregate to form colonies. In the third major step required to generate ES cell lines, the individual, nondifferentiating colonies are dissociated and replated into new dishes, a step called passage. This replating process establishes a “line” of ES cells. The line of cells is termed “clonal” if a single ES cell generates it. Limiting dilution methods can be used to generate a clonal ES cell line. Reagents needed for the culture of stem cells are commercially available, for example, from Invitrogen, Stem Cell Technologies, R&D Systems, and Sigma Aldrich, and are described, for example, in U.S. Patent Application Publication Numbers 20040235159 and 20050037492 and Appendix C of the NIH report, Stem Cells: Scientific Progress and Future Research Directions, supra.

[0117] Although the preferred methods of the invention include transfection of the transgene into the stem cell after the stem cell line has been established, it is also possible to generate a chimeric transgenic mouse having the transgene integrated into the mouse chromosome. The transgene would then be present in the germ line and the mouse would be mated to produce embryos with an integrated transgene. The inner cell mass of a preimplantation blastocyst having the integrated transgene is removed from the trophectoderm that surrounds it and used to establish a stem cell line as described above.

### Transfection of Transgenes

[0118] After a stem cell line has been established, the cells can be transfected or transduced (for viral vectors), with a transgene of the invention to prevent or control stem cell differentiation. Transgenes may be integrated into the chromosome or may be episomal depending on the methods used for delivery of the transgene. Methods for delivery of a transgene into cells using plasmids or viral vectors are known in the art. Suitable methods for transfecting or infecting host cells can be found in Sambrook et al. (Molecular Cloning: A Laboratory Manual, 2nd Edition, Cold Spring Harbor Laboratory press (1989)); Goeddel et al., (Gene Expression Technology: Methods in Enzymology, Academic Press, San Diego, Calif. (1990); Ausubel et al. (Current Protocols in Molecular Biology John Wiley & Sons, New York, N.Y. (1998); Watson et al., Recombinant DNA, Chapter 12, 2nd edition, Scientific American Books (1992); and other laboratory textbooks. For a review of methods for delivery of a transgene see Stull, The Scientist, 14:30-35 (2000). Recombinant plasmids or vectors can be transferred by methods such as calcium phosphate precipitation, electroporation, liposome-mediated transfection, gene gun, microinjection, viral capsid-mediated transfer, or polybrene-mediated transfer. For a review of the procedures for liposome preparation, targeting and delivery of contents, see Mannino and Gould-Fogerite, (Bio Techniques, 6:682-690, 1988), Felgner and Holm, (Bethesda Res. Lab. Focus, 11:21, 1989) and Maurer (Bethesda Res. Lab. Focus, 11:25, 1989). For viral transduction, viral vectors are generally first transferred to a helper cell culture, using the methods described above, for the production of virus. Viral particles are then isolated and used to infect the intended stem cell line. Techniques for the production and isolation of viral particles and the use of viral particles for infection can also be found in the references cited above and in U.S. Patent Application Publication Number 20040241856.

[0119] There are a variety of plasmids and viral vectors useful for delivery of a transgene and these are known in the art. See, for example, Pouwels et al., Cloning Vectors: A Laboratory Manual (1985). Supp. 1987) and the references cited above. Plasmids and viral vectors are also commercially available, for example, from Clontech, Invitrogen, Stratagene, and BD Biosciences.

[0120] In general, preferred plasmids or viral vectors include the following components: a multiple cloning site consisting of restriction enzyme recognition sites for cloning of the transgene, and a eukaryotic selectable marker (positive or negative) for selection of transfected or transduced cells in media supplemented with the selection agent. Preferred selectable markers include drug resistance markers, antigenic markers, adherence markers, and the like. Examples of antigenic markers include those useful in fluorescence-activated cell sorting. Examples of adherence markers include receptors for adherence ligands that allow selective adherence. Other selection markers include a variety of gene products that can be detected in experimental assay protocols, such as marker enzymes, amino acid sequence markers, cellular phenotypic markers, nucleic acid sequence markers, and the like. In general, positive selection marker genes are drug resistance genes. Suitable positive selection markers include, for example, nucleic acid sequences encoding neomycin resistance, hygromycin resistance, puromycin resistance, histidinol resistance, xanthine utilization, zeocin resistance, and bleomycin resistance. The positive selection marker can be operably linked to a promoter in the nucleic acid molecule (e.g., a prokaryotic promoter or a phosphoglycerate kinase (“PGK”) promoter).

[0121] In general, negative selection marker genes are used in situations whereby the expressed gene product leads to the elimination of the host cell, for example, in the presence of a nucleoside analog, such as gancyclovir. Suitable negative selection markers include, for example, nucleic acid sequences encoding Hprt, gpt, HSV-tk, diphtheria toxin, ricin toxin, and cytosine deaminase.

[0122] Plasmids or viral vectors can also contain a polyadenylation site, one or more promoters, and an internal ribosome entry site (IRES), which permits attachment of a downstream coding region or open reading frame with a cytoplasmic polysomal ribosome to initiate translation in the absence of internal promoters. IRES sequences are frequently located on the untranslated leader regions of RNA viruses, such as the Picornaviruses. The viral sequences range from about 450-500 nucleotides in length, although IRES sequences may also be shorter or longer (Adam et al. J Virol 65: 4985-4990 (1991); Borman et al. Nuc. Acids Res. 25: 925-32 (1997); Hellen et al. Curr. Top. Microbiol. Immunol. 203: 31-63 (1995); and Mountford et al. Trends Genet. 11: 179-184 (1995)). The encephalomyocarditis virus IRES is one such IRES which is suitable for use in this invention.

[0123] Plasmids or viral vectors can also include a bacterial origin of replication, one or more bacterial promoters, and a prokaryotic selectable marker gene for selection of transformed bacteria and production of the plasmid or vector. Bacterial selectable marker genes can be equivalent to or different from eukaryotic selectable marker genes. Non-limiting examples of preferred bacterial selectable marker genes include nucleic acids encoding ampicillin resistance, kanamycin resistance, hygromycin resistance, and chloramphenicol resistance.

[0124] Desirably, plasmids or viral vectors will also include sequences for the excision and removal of the transgene. Recombinase recognition sequences useful for targeted recombination are used for methods of controlling differentiation and are described in detail below. Non-limiting examples of recognition sequences that can be included in the plasmids or vectors used in the invention are loxP sequences or FRT sequences. The loxP site consists of two 13-bp inverted repeats flanking an 8-bp nonpalindromic core region. The loxP sequence is a DNA sequence comprising the following nucleotide sequence (hereinafter this sequence is referred to as the wild type loxP sequence):

(SEQ ID NO: 41)

5′-ATAACTTCGTATA ATGTATGC TATACGAAGTTAT-3′

(SEQ ID NO: 42)

3′-TATTGAAGCATAT TACATACG ATATGCTTCAATA-5′

[0125] However, the loxP sequence need not be limited to the above wild type loxP sequence, and part of the wild type loxP sequence may be replaced with other bases as long as the two “recombinase recognition sequences” become substrates for the Cre recombinase. Furthermore, even those loxP sequences (mutant loxP sequences) that normally do not become substrates for recombinase Cre in a combination with the wild type loxP sequence but become substrates for recombinase Cre in a combination with the mutant loxP sequences of the same sequence by base replacement of the wild type loxP sequence (i.e., sequences for which the entire process of cleavage, exchange, and binding of DNA strands takes place) are included in the recognition sequences of recombinase Cre. Examples of such mutant loxP sequences are described in Hoess et al., (Nucleic Acids Res. 14:2287-2300 (1986)), in which one base in a spacer region of the wild type loxP sequence has been replaced and Lee et al., (Gene 14:55-65 (1998)), in which two bases in the spacer region have been replaced.

[0126] FLP recognition sequences include any sequence that becomes a substrate for recombinase FLP, wherein FLP causes the entire process of cleavage, exchange, and binding of DNA chains between two recombinase recognition sequences. Examples include the FRT sequence, which is a 34-base DNA sequence (Babineau et al., J. Biol. Chem. 260:12313-12319 (1985)). As described for the Cre recognition sequences above, an FLP recognition sequence is not limited to the above wild type FRT sequence. Part of the wild type FRT sequence may be replaced with other bases as long as two FLP recombinase recognition sequences can become substrates for FLP recombinase. Furthermore, even those FRT sequences (mutant FRT sequences) that normally do not become substrates for recombinase FLP in a combination with the wild type FRT sequence but become substrates for recombinase in a combination with the mutant FRT sequences of the same sequence by base replacement of the wild type FRT sequence (i.e., sequences for which the entire process of cleavage, exchange, and binding of DNA strands takes place), are included in the FLP recognition sequences. For examples of FRT sequences, see McLeod et al., Mol Cell Biol., 6:3357-3367 (1986).

[0127] Non-limiting examples of viral vectors useful in the invention include adenoviral vectors, adeno-associated viral vectors, retroviral vectors, Epstein-Barr virus vectors, lentivirus vectors, herpes simplex virus vectors, and vectors derived from murine stem cell virus (MSCV) and hybrid vectors described by Hawley (Curr. Gene Ther. 1:1-17 (2001). Numerous vectors useful for this purpose are generally known and have been described (Miller, Human Gene Therapy 15:14, 1990; Friedman, Science 244:1275-1281, 1989; Eglitis and Anderson, BioTechniques 6:608-614, 1988; Tolstoshev and Anderson, Current Opinion in Biotechnology 1:55-61, 1990; Sharp, The Lancet 337:1277-1278, 1991; Cornetta et al., Nucleic Acid Research and Molecular Biology 36:311-322, 1987; Anderson, Science 226:401-409, 1984; Moen, Blood Cells 17:407-416, 1991; Miller and Rosman, Biotechniques 7:980-990, 1989; Rosenberg et al., N. Engl. J. Med 323:370, 1990, Groves et al., Nature, 362:453-457, 1993; Horrelou et al., Neuron, 5:393-402, 1990; Jiao et al., Nature 362:450-453, 1993; Davidson et al., Nature Genetics 3:2219-2223, 1993; Rubinson et al., Nature Genetics 33, 401-406, 2003; Buning et al., (Cells Tissues Organs 177:139-150 (2004)); and Tomanin et al., Curr. Gene Ther. 4:357-372 (2004).

[0128] In one preferred example, an Epstein Barr virus (EBV) based vector is used which remains episomal and can propagate indefinitely. In this example, the recombinase sequences are introduced around the EBV replication origin and after treatment with the appropriate recombinase, the origin of replication is lost and the episomal sequences will no longer propagate resulting in loss of the episomal sequences.

[0129] Non-limiting examples of plasmids useful in the invention include pSG, pSV2CAT and PXt1 from Stratagene, and pMSG, pSVL, pBPV, and pSVK3 from Pharmacia.

[0130] The above-described methods for introducing Tsix or Xite transgenes into stem cells can also be used for delivery of therapeutic genes to the stem cells before or after differentiation has been blocked.

### Assays for Transgene Expression

[0131] Once a stem cell culture has been infected, transfected, or microinjected with the transgene or small RNA molecule, cells are cultured in selection media to isolate cells that stably express the plasmid or viral vector that contains the transgene. Selection methods are generally known in the art and include, for example, culturing of cells in media containing a selection agent for selection of cells expressing the appropriate selectable marker gene. The selectable marker gene can encode a negative selection marker, a positive selection marker or a fusion protein with positive and negative selection traits. Negative selection traits can be provided in situations whereby the expressed gene leads to the elimination of the host cell, frequently in the presence of a nucleoside analog, such as gancyclovir. Positive selection traits can be provided by drug resistance genes. Suitable negative selection markers include, for example, nucleic acid sequences encoding Hprt, gpt, HSV-tk, diphtheria toxin, ricin toxin, and cytosine deeaminase. Suitable positive selection markers include, for example, nucleic acid sequences encoding neomycin resistance, hygromycin resistance, puromycin resistance, histidinol resistance, xanthine utilization, Zeocin resistance, and bleomycin resistance. Drug resistant cells can either be pooled for a mixed population or colonies can be individually selected (e.g., small groups of about 25 to 1000 cells, preferably, 25 to 500 cells, and most preferably 25 to 100 cells) and plated to generate clonal cell lines or cell lines in which a high proportion (80%, 85%, 90%, 95% or more) of the cells express the transgene.

[0132] Genetic alteration of stem cells is rarely 100%, and the population of cells that have been successfully altered can be enriched, for example, by co-transfection of the transgene with a label such as GFP or an immunostainable surface marker such as NCAM which can be used to identify and isolate transfected cells by fluorescence-activated cell sorting.

[0133] Cells expressing the transgene can be assayed for the presence of markers of proliferation, indicators of an undifferentiated cell, or the absence of indicators of differentiation to determine if differentiation has been successfully prevented. Examples of assays for differentiation are described below.

[0134] Cell lines that express the transgene and are blocked from differentiating are included in the invention. Such cells can be maintained indefinitely and used for any therapeutic purpose requiring a stem cell, such as those described herein. Such cells can also be genetically modified with a therapeutic transgene. For example, a “master” mammalian (e.g., human) ES cell line or a “master” mammalian (e.g., human) adult stem cell line of the invention can be genetically modified for use in the treatment of neurodegenerative disorders (e.g., Alzheimer's or Parkinson's or traumatic injury to the brain or spinal cord), hematologic disorders (e.g., sickle cell, thalassemias), muscular dystrophies (e.g., Duchenne's muscular dystrophy), endocrine disorders (e.g., diabetes, growth hormone deficiency), Purkinje cell degeneration, heart disease, vision and hearing loss and others.

### Differentiation

[0135] Cells in which differentiation is effectively blocked by the introduction of a transgene or small RNA molecule using the methods of the invention can be assayed by detecting phenotypic characteristics of undifferentiated cells or by detecting either the presence of markers specific for undifferentiated cells, or the absence of markers or characteristics of differentiated cells.

[0136] The morphology of the undifferentiated stem cell is distinct from that of the differentiated stem cell and morphological characteristics can be used to identify stem cells that are successfully transfected with the transgene and that remain in the undifferentiated state. Generally, ES cells are immortalized and have a rounded morphology, a high radiance level, and very little cellular outgrowth on gelatinized plates. Methods for detecting morphology of the transfected stem cells are also known in the art.

[0137] Markers that indicate the undifferentiated state or that indicate the absence of differentiation can also be used. In the first instance, markers such as stage-specific embryonic antigen (SSEA) 1, 3, and 4, surface antigens TRA-1-60 and TRA-1-81, alkaline phosphatase, Nanog, Oct-4, and telomerase reverse transcriptase are all indicators of the undifferentiated state of the stem cell for mouse, primate, or human cells. A molecular profile of additional genes expressed by undifferentiated ES cells that can be used to monitor ES cell differentiation are described in Bradenberger et al., (BMC Dev. Bio. 4:10 (2004)).

[0138] In the second instance, undifferentiated cells can be identified by the absence of markers of differentiation. Exemplary markers of differentiation include any protein or mRNA that is characteristic of a particular differentiated cell and will be known to the skilled artisan. For example, cells that have differentiated into neurons will express tyrosine hydroxylase, cells that have differentiated into oligodendrocytes will express NG2 proteoglycan, A2B5, and PDGFR-α, and will be negative for NeuN, cells that have differentiated into T lymphocytes will express CD4 and CD8, and cells that have differentiated into a mature granulocyte will express Mac-1.

[0139] Additional examples of markers of differentiated and undifferentiated cell types can be found at the in Appendix E of the NIH report stem cells entitled Stem Cells: Scientific Progress and Future Research Directions, supra. Methods for detecting the expression of protein markers, transcription factors, or surface antigens or the mRNA or genes encoding these (e.g., the Pou5f1 gene that encodes the Oct-3/Oct-4 transcription factor) are known in the art and include, for example, immunstaining, immunoblotting, immunohistochemistry, PCR, southern blotting, northern blotting, RNase protection assays, and in situ hybridization.

### Inactivation of Transgenes

[0140] For applications (e.g., therapeutic applications) that require control of the switch from the undifferentiated state to the differentiated state, the transgene is inactivated to reduce or eliminate the block to differentiation. In preferred embodiments, the transgene is inactivated by removal of the transgene using, for example, site specific recombination methods. For such applications, the genetically modified stem cell is maintained for a suitable time period sufficient for manipulation or handling (e.g., 1 to 90 days, preferably 1 to 45 days, more preferably 1 to 30 days or 1 to 10 days) prior to removal of the transgene.

[0141] Any site specific recombinase/DNA recognition sequence known in the art can be used to remove the transgene from the stem cells of the invention. One example of a site-specific recombinase is Cre recombinase. Cre is a 38-kDa product of the cre (cyclization recombination) gene of bacteriophage P1 and is a site-specific DNA recombinase of the Int family (Sternberg et al., J Mol. Biol. 187: 197-212 (1986). Cre recognizes a 34-bp site on the P1 genome called loxP (locus of X-over of P1) and efficiently catalyzes reciprocal conservative DNA recombination between pairs of loxP sites. The loxP site consists of two 13-bp inverted repeats flanking an 8-bp nonpalindromic core region. Cre-mediated recombination between two directly repeated loxP sites results in excision of DNA between them as a covalently closed circle. Cre-mediated recombination between pairs of loxP sites in inverted orientation will result in inversion of the intervening DNA rather than excision. Breaking and joining of DNA is confined to discrete positions within the core region and proceeds one strand at a time by way of transient phophotyrosine DNA-protein linkage with the enzyme. Additional examples of site-specific recombination systems include the integrase/att system form bacteriophage lambda and the FLP (flippase)/FRT system from the Saccharomyces cerevisiae 2pi circle plasmid. Additional details on these and additional or modified recombinase/DNA recognition sequences and methods for using them can be found, for example, in U.S. Pat. Nos. 4,959,317; 5,527,695; 6,632,672; and 6,734,295; Kilby et al. Trends Genet. 9:413-421 (1993); Gu et al. Cell 73:1155-1164. (1993); Branda et al., Dev. Cell. 6:7-28 (2004); Sauer Endocrine 19:221-228 (2002; Pfeifer et al., Proc. Natl. Acad. Sci. 98:11450-11455 (2001), and Ghosh et al., Methods 28:374-83 (2002).

### Assays for Transgene Inactivation

[0142] After the genetically altered stem cells have been maintained for the desired period of time, successful inactivation of the transgene or small RNA molecule (for example, by natural degradation) can be assayed using a variety of techniques that will be known to the skilled artisan. For example, the ability of the cells to grow in selection media can be used as an assay for the successful removal of the transgene. In this example, the use of the recombinase eliminates all transgene sequences (except for one remaining recognition site) including the selectable marker gene. As a result, the cells lose the ability to grow in positive selection media. Cells can be seeded and grown into clonal cell lines using standard limiting dilution methods. Clonal cell lines can be replica plated and one set can be cultured in the presence of the selection agent while the second is cultured in the absence of selection agent. Cells that have lost their ability to grow in the selection media are identified as cells that have lost the transgene. The matched set of these cells can then be grown in the absence of the selection media, expanded, and used as desired.

[0143] While removal of the trans gene should be sufficient to induce X chromosome inactivation and potentiate differentiation of the cells, in some cases additional factors may be required to fully induce differentiation or to induce differentiation into a desired cell type. Such factors are described, for example, in U.S. Patent Application Publication Number 20050037492 and in Appendix D of the NIH report stem cells entitled Stem Cells: Scientific Progress and Future Research Directions, supra.

[0144] Identification of phenotypic characteristics of differentiation or markers of differentiation, as described above, can also be used to identify cells in which the transgene is inactivated and the cells have successfully undergone differentiation.

[0145] As described above, the transgenes are known to block X chromosome inactivation. Accordingly, assays for X chromosome inactivation, include nucleation of chromosome pairing, can also be used to identify cells in which the transgene is inactivated and/or that no longer harbor the transgene. Examples of such assays are described herein (e.g., fluorescent in situ hybridization (Ogawa et al., supra) or in Lee et al., Cell (1999), supra, Stavropoulos et al., Proc. Natl. Acad. Sci. 98:10232-10237 (2001), Lee, Nature Genetics (2002), supra, and Ogawa et al., supra.

### Combination Methods

[0146] Any of the transgenes described herein can be used in combination with additional transgenes described herein to enhance the desired effects. In addition, a combination of the use of siRNA with one or more transgenes of the invention can also be used to achieve the desired effects. If desired, the methods described herein may be combined with additional methods known in the art to reduce differentiation in stem cells. Such methods include growth on a feeder layer of mouse embryonic fibroblast cells, growth in Matrigel™, the addition of leukemia inhibitory factor to the culture medium, and the addition of map kinase kinase inhibitors such as PD98059 (Sigma, catalog number P215-5MGA), LIF, Oct-4, Gab1, STAT3, or FGF, (or factors that activate the activity or expression of these proteins) to the culture media (see, for example, the methods described in Xu et al., Nature Biotech. 19:971 (2001), Amit et al., Biol. Reprod. 70:837-45 (2004), PCT Publication Number WO 01/51616, and U.S Patent Application Publication Numbers 20040235159 and 20050037492).

### Therapeutic Applications

[0147] The methods for regulating differentiation of stem cells described herein have numerous clinical, agricultural, and research uses that will be appreciated by the skilled artisan. Stem cells have enormous clinical potential because of their ability to differentiate into any cell type of the body. The cells can be used as the starting point for the generation of replacement tissue or cells, such as cartilage, bone or bone cells, muscle or muscle cells, neuronal cells, pancreatic tissue or cells, liver or liver cells, fibroblasts, and hematopoetic cells. Using the methods described herein, the clinician or researcher can introduce the appropriate transgene into the stem cells to prevent differentiation and then remove the transgene just prior to administering the cell product to the patient. If small RNA is used, such small RNA will generally degrade naturally and does not need to be removed.

[0148] The methods for regulating differentiation of mammalian stem cells described herein, for example, can be used for the treatment of diseases treatable through transplantation of differentiated cells derived from ES cells. The ES cells are maintained in the undifferentiated state for a period of time sufficient to genetically manipulate the cells prior to differentiation either to reduce immunogenicity or to give new properties to the cells to combat specific diseases. Furthermore, the use of the methods for regulating differentiation described herein not only allow the practitioner sufficient time to genetically modify the stem cells but, because of the ability of the stem cell to self-renew, allow for the gene to be maintained throughout successive cell divisions, thereby circumventing the need for repeated transgene introduction.

[0149] Stem cells of the invention or produced using the methods of the invention can be used to treat, for example, neurodegenerative disorders (e.g., Alzheimer's or Parkinson's or traumatic injury to the brain or spinal cord), hematologic disorders (e.g., sickle cell, thalassemias), muscular dystrophies (e.g., Duchenne's muscular dystrophy), endocrine disorders (e.g., diabetes, growth hormone deficiency), Purkinje cell degeneration, heart disease, vision and hearing loss and others in any mammal, preferably a human. Additional examples of the use of genetically modified stem cells in experimental gene therapies are described in Chapter 11 of NIH report stem cells entitled Stem Cells: Scientific Progress and Future Research Directions, supra and also in Shufaro et al., Best Pract. Res. Clin. Obstet. Gynaecol. 18:909-927 (2004).

[0150] The cells and methods of the invention can also be used for agricultural purposes to clone desirable livestock (e.g., cows, pigs, sheep) and game. For such purposes, the appropriate species of stem cell line and transgene are used.

### Research Applications

[0151] The invention can also be used for research purposes for the study of differentiation or development, and for the generation of transgenic animals useful for research purposes. The stem cells and the methods for regulating the differentiation of the stem cells described herein can be used, for example, to identify signaling pathways or proteins involved in differentiation processes, which can lead to the identification of future therapeutic targets for the treatment of a variety of diseases. The stem cells and methods of the invention can also be used to study the effects of a particular gene or compound on stem cell differentiation, development, and tissue generation or regeneration.

### EXAMPLES

[0152] The following examples are provided for the purposes of illustrating the invention, and should not be construed as limiting.

### Example 1

### Models for XCI and the Counting Elements Involved

[0153] X-chromosome inactivation achieves dosage compensation in mammals by establishing equal X-chromosome expression in XX (female) and XY (male) individuals (Lyon, Nature 190: 372-373 (1961)). The XCI pathway involves a series of molecular switches that include X-chromosome counting, epigenetic choice, and chromosome-wide silencing (Avner et al., Nature Rev. Genet. 2:59-67 (2001)). ‘Counting’ ensures that XCI occurs only in nuclei with more than one X (n>1). When n>1, a ‘choice’ mechanism epigenetically selects one X as the active X (Xₐ) and the second X as the inactive X (Xᵢ). During choice, the parallel action of three noncoding, cis-acting genes—Xist (Brown et al., Cell 71:527-542 (1992); N. Brockdorff et al., Cell 71:515-526 (1992)), Tsix (Lee et al., Nature Genet. 21:400-404 (1999)), and Xite (Ogawa et al., supra)—establishes the respective fates of each chromosome. On the designated Xᵢ, Xist RNA (produced in cis) envelopes the X-chromosome (Clemson et al., J. Cell Biol. 132:259-275 (1996)) and initiates chromosome-wide silencing on the X in cis (Penny et al., Nature 379:131-137 (1996); Marahrens et al., Genes & Dev. 11:156-166 (1997)). On the designated Xₐ, the antisense action of Tsix together with the enhancing action of Xite blocks the promulgation of Xist RNA to maintain chromosome activity (Ogawa et al., supra; Lee et al., Cell (1999), supra; Lee et al., Cell (2000), supra; Sado et al., supra). In short, the choice and silencing steps of XCI are controlled by the opposing and dynamic action of RNA-producing genes.

[0154] Although the counting mechanism makes up the apical switch, little is known about how it functions. General rules have been inferred from studies of sex chromosome aneuploids (Lyon, supra; Rastan, J. Embryol. Exp. Morph. 78:1-22 (1983); Rastan et al., J. Embryol. Exp. Morph. 90:379-388 (1985)). For example, the number of Xs subject to inactivation follows the ‘n−1’ rule, whereby all but one X is inactivated in diploids. Therefore, XX cells silence one X, while XXX cells silence two. Counting is also influenced by ploidy, as shown by the fact that, while diploids maintain only one Xₐ, tetraploids can maintain two Xₐ and octaploids can maintain four Xₐ (Lyon, supra; Webb et al., Genet. Res. 59:205-214 (1992); Jacobs et al., Am. J. Hum. Genet. 31:446-457 (1979)). Therefore, the mammalian counting mechanism is not determined by the absolute number of X-chromosomes, but rather by the X-to-autosome (X:A) ratio. This implies that specific X-linked and autosomal factors (X-factor and A-factors, respectively) are measured during early development.

[0155] Two types of models for counting have been advanced in recent years. The most widely accepted model (Avner et al., supra; Lyon, supra; Rastan, (1983), supra)—herein named the ‘singularity model’—posits that counting is achieved by a single ‘blocking factor’ which binds and protects a single X from inactivation in diploids. All other X's are silenced by default. An alternative ‘duality’ model (et al., Lee et al., Cell (1999), supra) postulates regulation by two factors: a blocking factor that protects the future Xₐ and a ‘competence factor’ that induces XCI on the future Xᵢ. A key difference between the models is that, while the singularity model stipulates that Xᵢ's are formed by default, the duality model requires purposeful action to achieve both the Xₐ and Xᵢ. The current evidence does not conclusively favor either.

[0156] To date, specific X-linked and autosomal factors have not been identified, despite a growing catalogue of XCI mutations. A priori, mutations in the counting pathway could be recognized by any deviation from the expected number of Xᵢ. These include the appearance of an Xᵢ in XY or XO cells, absence of any Xᵢ in XX cells, or the appearance of a second Xᵢ in XX cells (FIG. 8A). Using mouse embryonic stem (ES) cells as an ex vivo system to study XCI, transgenic analyses have shown that elements within or near the X-inactivation center (Xic) are involved in counting (Lee et al., Cell (1996), supra; Heard et al., Molec. Cell. Biol. 19:3156-3166 (1999); Lee et al., Proc. Natl. Acad. Sci. U.S.A. (1999), supra; Migeon et al., Genomics 59:113-121 (1999)). XY cells display ectopic XCI when additional copies of Xic sequence are introduced. In ES cells, knockout analyses have also suggested the presence of counting factors at the Xic in a region that spans Xist, Tsix, Xite, and Tsx (a testis-specific gene). A 65 kb deletion (Δ65 kb; FIG. 8B) of this region leads to ectopic Xᵢ in a subset of XO and XY cells (Clerc et al., Nature Genet. 19:249-253 (1998)). Adding back 37 kb of sequence up to but not including Tsx eliminates this population of abnormal cells (FIG. 8B, p37 kb)(Morey et al., Embo J 23:594-604 (2004)).

[0157] Based on available genetic experiments, a candidate counting element is thought to lie downstream of Xist, exclusive of the 5′ ends of Tsix and Xite (FIG. 8B)(Morey et al., Embo J23:594-604 (2004)). Evidence for this idea includes that knocking out the CpG island of Tsix (Lee et al., Cell (1999) supra; Sado et al., supra; Luikenhuis et al., Mol. Cell. Biol. 21:8512-8520 (2001)) and the major hypersensitive sites of Xite (Ogawa et al., supra; Sado et al., supra) does not produce an aberrant number of Xᵢ (FIG. 8B, TSix^{ΔCpG} and Xite^{ΔL}). Δ/Y males appropriately block XCI and Δ/+females exhibit a single Xᵢ. However, although Tsix and Xite heterozygous females seem to count appropriately, they are defective in choice, as there is a primary effect on selecting the mutated X as Xᵢ (Ogawa et al., supra; Lee et al., Cell (1999) supra; Lee et al., Cell (2000), supra; Sado et al., supra; Luikenhuis et al., Mol. Cell. Biol. 21:8512-8520 (2001); Stavropoulos et al., Proc. Natl. Acad. Sci. U.S.A. 98:10232-10237 (2001); Morey et al., Hum. Mol. Genet. 10:1403-1411 (2001)). These experiments demonstrate that counting and choice are, in fact, genetically separable.

[0158] Yet, while the knockout studies are clear with respect to Tsix's role in choice and not in counting, a recent observation has raised new possibilities (Lee, Nature Genet. (2002), supra). Specifically, although TsixΔ/+(henceforth X^{Δ}X) mice invariably inactivate the mutated X, TsixΔ/Δ (henceforth X^{Δ}X^{Δ}), homozygotes apparently revert to random XCI. Paradoxically though, X^{Δ}X^{Δ} embryos show greater in utero loss than their X^{Δ}Y and X^{Δ}X counterparts. These observations suggest that Tsix may play additional roles which are evident only when both alleles are mutated. Indeed, it has been proposed that Tsix not only selects the future Xₐ in cis but also ensures mutually exclusive choice by allowing cross-talk between the two antisense alleles (Lee, Nature Genet. (2002) supra). Loss of both alleles may therefore result in a state of ‘chaotic choice,’ whereby the choice decision occurs without coordination between the X's and leads to aberrant patterns of XCI. By chance alone, some X^{Δ}X^{Δ} cells may arrive at a normal pattern of XₐXᵢ, while others perish as a result of abnormal dosage compensation.

[0159] The model makes clear and testable predictions. If X^{Δ}X^{Δ} cells undergo chaotic choice, multiple aberrant patterns of XCI might be detectable in differentiating XX cells, as manifested by occurrence of some nuclei with two Xᵢ, some with one Xᵢ, and others with no Xᵢ (total chaos). A chaotic choice pattern bears striking resemblance to aberrant counting (FIG. 8A). Thus, the chaotic choice model further predicts that Tsix itself might be involved in counting. The study below tests this hypothesis and finds that specific noncoding genes play a role in counting. The unusual manifestations in XX and XY cells favors a duality model, which now provides a new conceptual framework for understanding the details of the counting mechanism.

### Chaotic XCI in a Homozygous Tsix ES Model

[0160] Because random XCI takes place in the epiblast (E4.5-5.5), the initiation of XCI is difficult to characterize in X^{Δ}X^{Δ} embryos due to limited cell numbers and potential contamination by abundant embryonic cells. To circumvent this problem, I set up X^{Δ}X^{Δ}×X^{Δ}Y crosses and cultured resulting blastocysts to generate X^{Δ}X^{Δ} ES cells. In mice, ES cells have provided a powerful ex vivo system to study XCI because they recapitulate XCI during cell differentiation. Ninety-three blastocysts were isolated from 11 crosses. Consistent with previous observation (Lee, Nature Genet. (2002) supra), a significant fraction of the blastocysts yielded poor quality ICM outgrowths. In total, five X^{Δ}X^{Δ} ES lines were established and identified by Southern blotting (FIG. 8C). Genomic DNAs were digested with BamHI, subjected to gel electrophoresis, blotted onto membrane, and hybridized to a 1.4 kb NdeI-MluI fragment downstream of the Tsix start site (Lee et al., Cell (1999), supra). WT, wild type female (16.7); BA9, X^{Δ}X control. These results indicated that it is possible to isolate ES cells with a homozygous Tsix deficiency despite the poor overall fitness of X^{Δ}X^{Δ} embryos (Lee, Nature Genet. (2002) supra). Clones Δf1, Δf5, Δf10, Δf25, and Δf41 were confirmed as female by lack of a Y-chromosome as determined by Y-chromosome painting, absent bands in Zfy PCR experiments, and occurrence of two Xs in a diploid background as determined by fluorescence in situ hybridization (FISH) (FIG. 8D). FISH carried out as described previously (Ogawa et al., Mol Cell 11:731-743 (2003); Lee et al., supra). Because all five X^{Δ}X^{Δ} clones behaved similarly (Table 3, FIG. 13), results below will be shown only for representative clones. X^{Δ}Y male (Δf4) and X^{Δ}O female (Δf21, Δf32) lines were also isolated as controls. Clones Δf4, Δf21, and Δf32 all carry a single X-chromosome, and Δf4 also carries a Y-chromosome (FIG. 8E). Once established in culture, X^{Δ}X^{Δ} ES lines grew no differently from WT (wildtype) female ES cells in the undifferentiated state. However, upon differentiation into embryoid bodies (EB), several differences were immediately evident. To generate EB, adherent ES cells were lightly trypsinized to generate detached clusters on d0, grown in suspension culture as clusters (EB) for 4 days in DME+15% fetal calf serum without LIF, and plated on gelatin on d4 for another 4-6 days to generate EB outgrowths (Lee et al., Proc. Natl. Acad. Sci. U.S.A. (1999), supra). First, all ^{XΔXΔ} EB grew poorly as compared to WT, X^{Δ}X, and X^{Δ}O controls. X^{Δ}X^{Δ} EB tend to remain small, break up during culture, and generate an unusual amount of cellular debris (FIG. 9A). To quantitate cell death, EB were grown as usual and all cells (both loose in suspension or adherent on plates) were harvested on d0, d4, and d8 for staining with trypan blue. To calculate the percent dead, the number of cells staining blue (dead) was divided by the total number of cells staining blue (dead) and excluding dye (alive). Cell death analysis revealed that a large fraction of X^{Δ}X^{Δ} cells lose viability as compared to WT (P<0.01), beginning immediately after formation of EB and culminating on day 8 (FIG. 9B). This contrasted with a rate for the X^{Δ}O control (Δf32) that is comparable to WT (P>0.2). Interestingly, despite massive cell death, a fraction of X^{Δ}X^{Δ} EB could attach on day 4 and give rise to EB outgrowths, albeit not so robustly as WT, X^{Δ}X, or X^{Δ}O EB (FIGS. 9A, d9, FIG. 13). This result agreed with the in vivo finding that X^{Δ}X^{Δ} embryos are frequently lost in utero but can occasionally survive to birth (Lee, Nature Genet. (2002) supra).

[0161] To assess the XCI status of mutant clones, I next performed Xist RNA FISH to determine whether an Xᵢ (Xist RNA nuclear domain) formed at the single-cell level. Like WT female lines, X^{Δ}X^{Δ} ES lines maintained two Xₐ in the undifferentiated state, as deduced by the absence of Xist accumulation on day 0 of differentiation (FIG. 9C). FISH carried out as described previously (Ogawa et al., Mol Cell 11:731-743 (2003)). Upon differentiation, the pattern of XCI in X^{Δ}X^{Δ} cells became significantly different from that of controls, including WT, X^{Δ}X, X^{Δ}Y, and X^{Δ}O cells (FIGS. 9C,D; Table 3). Between days 2 and 4, when XCI normally initiates, mutant EB were characterized by three types of XCI patterns: those with two Xₐ, those with one Xᵢ, and those with two Xᵢ (FIGS. 9C,D). In contrast, WT and X^{Δ}X cells yielded only those with one Xᵢ and those with two Xₐ (reflecting a subpopulation that had not yet differentiated) (FIGS. 9C,D; Table 3). The controls, X^{Δ}O (Δf32) and X^{Δ}Y (Δf4), yielded no Xist expression on any day (FIG. 9C, Table 3).

[0162] Table 3 shows a summary of mutant ES cell lines and their characteristics. Multiple clones of each knockout and transgenic series were analyzed in this study, with three to four of each series shown. Only one male clone of pCC3, pCC4, p3.7, pXite, and pSxn series was examined, because the larger pSx7 transgenic lines indicated no phenotype in an XY background. All cell lines were generated in this study, except J1 (Li et al., Cell 69:915-926 (1992)), 16.6 (Lee et al., Cell (1999), supra), and BA9 (a 1-lox neo-minus derivative of 3F1)(Lee et al., Cell (1999), supra). Transgene copy numbers determined by Southern blot analysis, phosphorimaging, and FISH signal density and size. Low, 1-4 copies. High >5 copies. Tg, transgenic. n.a., not applicable.

TABLE 3
Summary of mutant ES cell lines and phenotypes

| | | | Tg | | | | | Xi number per 2n | |
|---|---|---|---|---|---|---|---|---|---|
| Category | Cell line | Genotype | Copies* | Growth/differentiation** | Cell Death | | | cell (days 2-4) | Counting |
| — | — | — | — | — | d 0 | d 4 | d 8 | — | — |
| WT controls | 16.6 (WT) | Female WT ES | n.a. | robust | 0.5% | 29.6% | 26.7% | 0, 1 | normal |
| | | (ref. 2) | | | | | | | |
| | J1 | Male WT ES | n.a. | robust | 0.3% | 25.5% | 31.4% | 0 | normal |
| | | (ref. 15) | | | | | | | |
| Tsix hetero- | BA9 | Female XΔX | n.a. | robust (same as WT) | 0.7% | 33.8% | 34.5% | 0, 1 | normal |
| zygote | | (ref. 2) | | | | | | | |
| Tsix hemi- and | Δf4 | Male XΔY | n.a. | robust (same as WT) | 0.2% | 30.9% | 31.4% | 0 | normal |
| homo- zygotes | Δf21 | Female XΔ◯ | n.a. | robust (same as WT) | 0.4% | 25.6% | 31.7% | 0 | normal |
| | Δf32 | Female XΔ◯ | n.a. | robust (same as WT) | 0.4% | 26.9% | 22.7% | 0 | normal |
| | Δf1 | Tsix homozygous | n.a. | small EB, slow | 0.9% | 42.0% | 56.3% | 0, 1, 2 | aberrant |
| | | XΔXΔ | | outgrowth | | | | | |
| | Δf5 | Tsix homozygous | n.a. | small EB, slow | 0.5% | 59.5% | 38.9% | 0, 1, 2 | aberrant |
| | | XΔXΔ | | outgrowth | | | | | |
| | Δf10 | Tsix homozygous | n.a. | small EB, slow | 0.7% | 50.4% | 57.0% | 0, 1, 2 | aberrant |
| | | XΔXΔ | | outgrowth | | | | | |
| | Δf25 | Tsix homozygous | n.a. | small EB, slow | 1.2% | 42.6% | 58.6% | 0, 1, 2 | aberrant |
| | | XΔXΔ | | outgrowth | | | | | |
| | Δf41 | Tsix homozygous | n.a. | small EB, slow | 0.6% | 41.4% | 38.2% | 0, 1, 2 | aberrant |
| | | XΔXΔ | | outgrowth | | | | | |
| Female Tg - | π2.1B | Female πJL2 Tg | low | small EB, minimal | 0.8% | 54.4% | 51.9% | 0, 1 (Xist | aberrant |
| (large Tg) | | | | outgrowth, d 8 dead | | | | predominantly | |
| | | | | | | | | on Tg) | |
| | π2.18 | Female πJL2 Tg | high | small EB, minimal | 0.8% | 56.7% | 67.1% | 0, 1 (Xist | aberrant |
| | | | | outgrowth, d 8 dead | | | | predominantly | |
| | | | | | | | | on Tg) | |
| | π2.22 | Female πJL2 Tg | low | small EB, minimal | 0.5% | 61.7% | 59.2% | 0, 1 | aberrant |
| | | | | outgrowth, d 8 dead | | | | (Xist on X or Tg) | |
| | π3.2B | Female πJL3 Tg | high | small EB, minimal | 0.9% | 62.1% | 62.7% | 0, 1, 2 | aberrant |
| | | | | outgrowth, d 8 dead | | | | (Xist on X) | |
| | π3.10 | Female πJL3 Tg | low | small EB, minimal | 0.5% | 58.1% | 54.1% | 0, 1 | aberrant |
| | | | | outgrowth, d 8 dead | | | | (Xist on X) | |
| | π3.15 | Female πJL3 Tg | high | small EB, minimal | 0.8% | 54.9% | 69.1% | 0, 1 | aberrant |
| | | | | outgrowth, d 8 dead | | | | (Xist on X) | |
| | Sx7.1B | Female pSx7 Tg | low | small EB, minimal | 0.5% | 55.9% | 62.5% | 0, 1 | aberrant |
| | | | | outgrowth, d 8 dead | | | | (Xist on X) | |
| | Sx7.4 | Female pSx7 Tg | high | small EB, minimal | 0.7% | 52.3% | 60.3% | 0, 1, 2 | aberrant |
| | | | | outgrowth, d 8 dead | | | | (Xist on X) | |
| | Sx7.6 | Female pSx7 Tg | low | small EB, minimal | 0.1% | 51.1% | 57.6% | 0, 1, 2 | aberrant |
| | | | | outgrowth, d 8 dead | | | | (Xist on X) | |
| Female Tg - | Sxn-4 | Female pSxn Tg | high | small EB, minimal | 0.0% | 63.7% | 62.0% | 0 | aberrant |
| (small Tg) | | | | outgrowth, d 8 dead | | | | | |
| | Sxn-6 | Female pSxn Tg | high | small EB, minimal | 0.3% | 70.3% | 70.5% | 0 | aberrant |
| | | | | outgrowth, d 8 dead | | | | | |
| | Sxn-7 | Female pSxn Tg | high | small EB, minimal | 0.1% | 69.0% | 66.3% | 0 | aberrant |
| | | | | outgrowth, d 8 dead | | | | | |
| | Sxn-12 | Female pSxn Tg | high | small EB, minimal | 0.3% | 68.5% | 57.8% | 0 | aberrant |
| | | | | outgrowth, d 8 dead | | | | | |
| | 3.7-5 | Female p3.7 Tg | high | d 5, large stunted EB; | 0.5% | 71.0% | 72.4% | 0 | aberrant |
| | | | | d 8, dead | | | | | |
| | 3.7-8 | Female p3.7 Tg | high | d 5, large stunted EB; | 0.7% | 72.8% | 67.9% | 0 | aberrant |
| | | | | d 8, dead | | | | | |
| | 3.7-10 | Female p3.7 Tg | high | d 5, large stunted EB; | 0.8% | 71.7% | 73.5% | 0 | aberrant |
| | | | | d 8, dead | | | | | |
| | 3.7-11 | Female p3.7 Tg | high | d 5, large stunted EB; | 0.9% | 60.1% | 70.1% | 0 | aberrant |
| | | | | d 8, dead | | | | | |
| | Xite-8 | Female pXite Tg | high | d 5, large stunted EB; | 0.2% | 68.5% | 76.1% | 0 | aberrant |
| | | | | d 8, dead | | | | | |
| | Xite-10 | Female pXite Tg | high | d 5, large stunted EB; | 0.3% | 75.4% | 76.9% | 0 | aberrant |
| | | | | d 8, dead | | | | | |
| | Xite-11 | Female pXite Tg | high | d 5, large stunted EB; | 1.0% | 70.0% | 72.4% | 0 | aberrant |
| | | | | d 8, dead | | | | | |
| | Xite-14 | Female pXite Tg | high | d 5, large stunted EB; | 0.9% | 72.2% | 74.9% | 0 | aberrant |
| | | | | d 8, dead | | | | | |
| | CC3-9 | Female pCC3 Tg | high | d 5, medium stunted EB; | 0.3% | 54.9% | 55.4% | 0 | aberrant |
| | | | | d 8, dead | | | | | |
| | CC3-11 | Female pCC3 Tg | high | d 5, medium stunted EB; | 1.1% | 57.4% | 55.8% | 0 | aberrant |
| | | | | d 8, dead | | | | | |
| | CC3-13 | Female pCC3 Tg | high | d 5, medium stunted EB; | 0.6% | 60.4% | 58.9% | 0 | aberrant |
| | | | | d 8, dead | | | | | |
| | CC3-15 | Female pCC3 Tg | high | d 5, medium stunted EB; | 0.4% | 59.4% | 52.0% | 0 | aberrant |
| | | | | d 8, dead | | | | | |
| | CC4-2 | Female pCC4 Tg | high | d 5, medium stunted EB; | 0.9% | 60.3% | 58.9% | 0 | aberrant |
| | | | | d 8, dead | | | | | |
| | CC4-8 | Female pCC4 Tg | high | d 5, medium stunted EB; | 0.9% | 56.1% | 52.7% | 0 | aberrant |
| | | | | d 8, dead | | | | | |
| | CC4-11 | Female pCC4 Tg | high | d 5, medium stunted EB; | 1.0% | 58.4% | 55.0% | 0 | aberrant |
| | | | | d 8, dead | | | | | |
| | CC4-17 | Female pCC4 Tg | high | d 5, medium stunted EB; | 0.3% | 54.5% | 50.1% | 0 | aberrant |
| | | | | d 8, dead | | | | | |
| Control - | WTneo1 | Female WT neo | n.a. | robust (same as WT XX) | 0.2% | 29.3% | 37.9% | 0, 1 | normal |
| (female Tg) | | Tg | | | | | | | |
| | Xist5′-5 | Female pXist5′ Tg | low | similar to WT XX | 0.5% | 36.6% | 39.4% | 0, 1 | normal |
| | Xist5′-6 | Female pXist5′ Tg | high | similar to WT XX | 2.6% | 37.1% | 37.3% | 0, 1 | normal |
| | Xist5′-7 | Female pXist5′ Tg | low | similar to WT XX | 0.1% | 28.7% | 32.4% | 0, 1 | normal |
| | Xist5′-8 | Female pXist5′ Tg | high | similar to WT XX | 0.1% | 21.6% | 28.6% | 0, 1 | normal |
| | Xist3′-1 | Female pXist3′ Tg | low | similar to WT XX | 0.4% | 32.7% | 33.5% | 0, 1 | normal |
| | Xist3′-2 | Female pXist3′ Tg | low | similar to WT XX | 0.8% | 35.4% | 33.8% | 0, 1 | normal |
| | Xist3′-3 | Female pXist3′ Tg | high | similar to WT XX | 0.2% | 32.1% | 34.0% | 0, 1 | normal |
| | Xist3′-4 | Female pXist3′ Tg | high | similar to WT XX | 0.7% | 37.1% | 31.3% | 0, 1 | normal |
| | Tsx-1 | Female pTsx Tg | low | similar to WT XX | 1.0% | 42.6% | 33.3% | 0, 1 | normal |
| | Tsx-2 | Female pTsx Tg | low | similar to WT XX | 0.8% | 35.6% | 33.2% | 0, 1 | normal |
| | Tsx-3 | Female pTsx Tg | high | similar to WT XX | 0.7% | 31.3% | 30.4% | 0, 1 | normal |
| | Tsx-4 | Female pTsx Tg | high | similar to WT XX | 1.4% | 43.8% | 42.1% | 0, 1 | normal |
| Control - | Sx7.6 | Male pSx7 Tg | low | similar to WT XY | 0.7% | 29.7% | 23.7% | 0 | normal |
| (male Tg) | Sx7.7 | Male pSx7 Tg | low | similar to WT XY | 0.9% | 27.8% | 28.1% | 0 | normal |
| | Sx7.8 | Male pSx7 Tg | high | similar to WT XY | 0.8% | 26.3% | 27.9% | 0 | normal |
| | 3.7-1 | Male p3.7 Tg | low | similar to WT XY | 0.8% | 30.4% | 25.2% | 0 | normal |
| | CC3-1 | Male pCC3 Tg | high | similar to WT XY | 0.4% | 23.0% | 28.9% | 0 | normal |
| | CC4-1 | Male pCC4 Tg | low | similar to WT XY | 0.8% | 26.4% | 27.1% | 0 | normal |
| | Xite-1 | Male pXite Tg | high | similar to WT XY | 0.8% | 33.5% | 30.3% | 0 | normal |
| | Sxn-1 | Male pSxn Tg | high | similar to WT XY | 0.8% | 28.1% | 24.1% | 0 | normal |

[0163] In X^{Δ}X^{Δ} cultures, there was a close correlation between success of EB outgrowth and achievement of proper dosage compensation. For example, EB that showed poor outgrowth often displayed clusters of cells with two prominent Xᵢ (FIG. 8E). On later days of differentiation, the increasing presence of EB outgrowths correlated with a rise in number of cells with the proper Xᵢ number (FIG. 8F). In general, there was significant stochastic variation among any X^{Δ}X^{Δ} EB culture with respect to EB outgrowth and achievement of dosage compensation.

[0164] From the experiments thus far, several observations suggest that XCI indeed proceeds in a chaotic fashion in X^{Δ}X^{Δ}—first, the occurrence of nuclei with two, one, and no Xᵢ within the same differentiating population; second, the massive cell death associated with aberrant Xᵢ number; and third, the gradual dominance of cells which showed a single Xᵢ, presumably as a result of selection against those that incorrectly chose none or multiple X's. Of particular interest is the fact that the abnormal characteristics were specific to the X^{Δ}X^{Δ} genotype (FIGS. 9A-9F). X^{Δ}Y and X^{Δ}O ES lines were not affected even though they also lack any Tsix function. Moreover, X^{Δ}X lines were spared. This argued that the defect is not related to sex per se, nor is the effect simply the result of absent Tsix function. Instead, the phenotype requires two co-existing conditions: the loss of both Tsix alleles and an XX background.

### Counting Defects Revealed Through Transgenesis

[0165] The massive cell death and the accompanying appearance of aberrant Xᵢ numbers suggested a counting defect (FIG. 8A) was responsible for the unusual X^{Δ}X^{Δ} phenotype. In principle, any counting element has to be precisely titrated in the cell. Therefore, if Tsix affects counting, supernumerary copies of Tsix would also disrupt XCI. To test this idea, I used ES transgenesis to introduce extra copies of Tsix. Because the Tsix deletion phenotype was dramatically different in XX and XY cells, I first determined whether Tsix transgenesis would also affect XX and XY cells differently. In XY cells, it was previously shown that introducing 80-460 kb of Xic sequence into XY ES cells led to ectopic inactivation of the X or the autosome in cis to the transgene (Lee et al., Cell (1996), supra; Heard et al., Molec. Cell. Biol. 19:3156-3166 (1999); Lee et al., Proc. Natl. Acad. Sci., (1999) supra; Migeon et al., supra), leading to the idea that a counting element resides within the Xic. Here, I re-created the transgenics in an XX background using the 80 kb plasmids, πJL2 and πJL3 (FIG. 10A)(Lee et al., Proc. Natl. Acad. Sci. U.S.A. (1999) supra). Multiple female clones for each transgene were isolated and three representative clones with low and high copy numbers were characterized in detail (FIG. 10B).

[0166] All female transgenics showed poor differentiation, with very few EB demonstrating outgrowth on day 5 of culture (FIG. 10C). In contrast, the previously generated male πJL2 and πJL3 transgenics (Lee et al., Proc. Natl. Acad. Sci. U.S.A. (1999) supra) and female controls carrying only the neo selectable marker (WTneo) yielded moderate to abundant outgrowth (FIG. 10C; Table 3, FIG. 14). Because XY transgenics apparently could differentiate into EB (Lee et al., Proc. Natl. Acad. Sci. U.S.A. (1999), supra), these results suggested XX and XY differences in a transgenic assay as well. FISH analysis of πJL2 and πJL3 transgenic females revealed Xist RNA accumulation on either the X's or transgene-bearing autosome (FIG. 10D), as have been reported for XY transgenics previously (Lee et al., Proc. Natl. Acad. Sci. U.S.A. (1999) supra).

[0167] A potential complication of these transgenes was the presence of Xist, which could stunt growth by ectopic autosomal inactivation (Lee et al., Proc. Natl. Acad. Sci. U.S.A. (1999), supra). To separate the effects of autosomal inactivation from that of a counting defect, I eliminated Xist expression by using pSx7 (FIG. 10A). pSx7 manifested profoundly different phenotypes in XX cells as compared to XY. While XY transgenics showed robust differentiation, XX cells yielded little to no EB outgrowth (FIG. 10C, FIG. 14). These results argued that the stunted EB growth occurred independently of Xist-induced autosomal inactivation. Examination of Xᵢ formation by Xist RNA FISH led to a further disparity between XX and XY cells: while pSx7 females underwent Xᵢ formation, pSx7 males never showed XCI (FIG. 10D, FIG. 14). This disparity provided additional insight into the counting process and is discussed in the next section.

[0168] Intriguingly, the frequency of Xist expression inversely correlated with transgene copy number (FIGS. 10D,E). In the πJL2 series, the low-copy clones (π2.1B, π2.22) showed an Xist domain in 23-44% of cells on day 4, but the high-copy clone (π2.18) possessed an Xist domain in only 14% of cells. In the latter, Xist RNA often appeared sparse (FIG. 10D, arrows) rather than the robust clusters seen in WT and low-copy clones. In πJL2 clones, Xist RNA accumulated on either the X or autosome, consistent with results found in XY cells (Lee et al., Proc. Natl. Acad. Sci. U.S.A. (1999) supra). Copy number likewise influenced Xist expression frequency in the πJL3 and pSx7 series. In these clones, however, Xist RNA accumulated only on the X and never on the autosome in these cells, consistent with πJL3's breakpoint in the Xist promoter reported previously in XY cells (Lee et al., Proc. Natl. Acad. Sci. U.S.A. (1999) supra) and with pSx7's deletion of the 5′ end of Xist. This dose-response relationship suggested the property of titrability and argues for counting element(s) in the pSx7 region.

### Tsix and Xite are Counting Elements

[0169] To pinpoint potential counting element(s), I fragmented the pSx7 transgene to segregate known landmarks (FIG. 11A). pSxn (19.5 kb) deletes all of Xist and includes the 5′ half of Tsix and Xite; p3.7 (3.7 kb) contains the full sequence deleted in Tsix^{ΔCpG} (Lee et al., Cell (1999) supra), including the Tsix promoter, DXPas34 repeat (Courtier et al., Proc. Natl. Acad. Sci. U.S.A. 92:3531-3535 (1995)), and part of the Tsix bipartite enhancer (Stavropoulos et al., Mol Cell Biol 25:2757-2769 (2005)); pCC3 (4.3 kb) contains several CTCF binding sites (Chao et al., Science 295:345-347 (2002)) and DXPas34; pCC4 (5.9 kb) contains the proximal half of bipartite enhancer (Stavropoulos et al., Mol Cell Biol (2005) supra); and pXite (5.6 kb) contains the major Xite intergenic transcripts, DNaseI hypersensitive sites, and a second Tsix enhancer (Ogawa et al., supra; Stavropoulos et al., Mol Cell Biol (2005) supra).

[0170] All five transgene series exhibited a dramatic disparity between XX and XY cells. The effects were most profound in the p3.7 and pXite series, the two containing promoters for Tsix and Xite. In general, XX transgenic EB colonies showed markedly fast radial growth between days 0 and 5, reaching a much larger size than the wildtype XX and XY controls or even πJL2 and πJL3 transgenics by day 5 (FIG. 11C). Intriguingly, despite 5-6 days of differentiation, the XX transgenic EB seemed to remain undifferentiated, as their colonies resembled day 0 ES cells in having a rounded morphology, high radiance level, and very little cellular outgrowth on gelatinized plates (FIG. 11C).

[0171] However, while the XX transgenics grew rapidly from days 2-5, their growth became severely impaired after day 6. While p3.7, pCC3, pCC4, pXite, and pSxn transgenics all shared these characteristics, the effects were again most pronounced in p3.7 and pXite transgenics. Day 6-8 cultures were characterized by accumulation of dead, detached cells (FIG. 11B; FIG. 11C: note disorganized masses in 3.7-11 and Xite-11 on d8). The extent of cell death reached as much as 70-75% of the total population between days 4 and 8 (FIG. 11B). To understand the cellular basis for these abnormalities, I examined the pattern of XCI in single cells using FISH. Remarkably, there was a complete absence of Xist accumulation at any time during cell differentiation in p3.7, pXite, pCC3, pCC4, pSxn transgenics (FIGS. 11D,E). This result contrasted with those for the larger πJL2, πJL3, and pSx7 and implied that critical elements for Xist induction have been deleted in the smaller transgenes. The absence of Xist RNA was not the result of an XO aneuploidy, as DNA FISH clearly demonstrated an XX constitution. Thus, supernumerary copies of 5′ Tsix and Xite sequences arrested XCI. This arrest apparently retards or blocks ES cell differentiation and eventually decimates the culture. Notably, the results for the small transgenics are opposite of those for Tsix X^{Δ}X^{Δ} (FIGS. 9A-9F). Between days 2-5, X^{Δ}X^{Δ} EB showed slow, fragmented growth, while XX transgenic EB showed high radial growth. Between days 6-9, X^{Δ}X^{Δ} EB showed overall improvement in differentiation (due to selection of appropriately dosage compensated cells), while XX transgenic EB degenerated. Additionally, while X^{Δ}X^{Δ} EB showed all possible numbers of Xᵢ, the XX transgenics failed to form an Xᵢ. These contrasting findings suggested that they represent opposite extremes of a counting defect: a deficiency of the critical element causes inappropriate XCI, while an excess suppresses XCI. The dose-dependent effects seen in πJL2, πJL3, and pSx7 transgenics further argued for a numerator that requires precise titration. Importantly, none of the XY transgenics manifested the defects. In multiple clones examined for p3.7, pDNT, pCC3, and pCC4, the XY EB showed normal growth throughout differentiation, normal cell death rates, and absence of an Xᵢ domain indicative of proper dosage compensation (FIGS. 11B,D and Table 3; one representative XY clone is shown). Thus, the peculiar phenotype can only be observed in transgenic cells with an XX constitution.

[0172] Furthermore, none of the transgenics carrying other Xic sequences manifested these defects. I tested multiple clones carrying the Tsx coding region and various fragments from Xist. In cell differentiation assays, the Tsx and Xist XX transgenics showed slightly slower growth rates and minimally elevated cell death rates (FIGS. 11B,C). However, by RNA FISH analysis, none of these controls lines displayed abnormal XCI patterns, as a single Xi domain appeared with normal kinetics during differentiation (FIGS. 11D,E). Thus, insofar as Xist and Tsx sequences had a mildly toxic effect on XX EB, this effect was not related to aberrant counting. These results demonstrated that the counting elements lie specifically within a 14 kb sequence (FIG. 11A), with the 5′ ends of Tsix and Xite displaying the strongest counting effects (solid purple bars) and adjacent regions also exerting effects, though less strongly (dashed purple bars). Thus, just as with the steps of choice and silencing, the initial step of counting is also controlled by noncoding genes.

### Noncoding Genes and the Duality Model

[0173] The mechanism of X-chromosome counting has remained a most elusive aspect of XCI. Models for counting must now reconcile several paradoxes uncovered by this study. Most intriguingly, why is the X^{Δ} active in Tsix X^{Δ}Y males (Lee et al., Cell (1999) supra), while it is silenced in X^{Δ}X (Lee et al., Cell (1999), supra; Sado et al., supra; Luikenhuis et al., Mol. Cell. Biol. 21:8512-8520 (2001); Lee, Nature Genet. (2002), supra) and silenceable in X^{Δ}X^{Δ} A critical factor must be missing in X^{Δ}Y but present in the female mutants. Furthermore, why do cells carrying large Xic transgenes permit X-inactivation (Lee et al., Cell (1996), supra; Heard et al., Molec. Cell. Biol. 19:3156-3166 (1999); Lee et al., Proc. Natl. Acad. Sci. (1999) supra; Migeon et al., supra), while those carrying small Tsix and Xite transgenes fail at XCI? Finally, why do the small transgenes affect XX cells but spare XY cells? The current work enables us to draw several novel conclusions.

[0174] First, Tsix and Xite regulate the counting process through elements at their 5′ ends. This conclusion seems at odds with the previous idea that a bi- or tri-partite structure contains the counting element (FIG. 8B)(Ogawa et al., supra; Lee et al., Cell (1999) supra; Sado et al., supra; Clerc et al., Nature Genet. 19:249-253 (1998); Morey et al., Embo J 23:594-604 (2004); Luikenhuis et al., Mol. Cell. Biol. 21:8512-8520 (2001)). However, past conclusions have been based largely on heterozygous mutants. The current study underscores the importance of extending analysis to homozygotes, as the observed peculiar effects were only evident once the second Tsix allele was eliminated. Homozygosing the Xite^{ΔL}, Δ65 kb, p37 kb, and ΔXist mutations will now be of interest (Ogawa et al., supra; Penny et al., Nature 379:131-137 (1996); Marahrens et al., Genes & Dev. 11:156-166 (1997); Clerc et al., Nature Genet. 19:249-253 (1998); Morey et al., Embo J 23:594-604 (2004)), as the phenotype relating to counting may be unexpected in the other homozygotes as well.

[0175] Importantly, this work does not distinguish between whether the critical element is a titratable DNA sequence or an RNA product of the two noncoding genes. A titratable DNA sequence seems more consistent, given the transgene data which suggest that promoterless sequences within the 14 kb domain (e.g., pCC3, pCC4) can exert a counting phenotype. I suggest that specific DNA elements near or in the promoters of Tsix and Xite act as binding sites for trans-acting factors, such as the putative blocking or competence factors.

[0176] A second major conclusion of this study relates to the merits of the singularity vs. the duality models for counting. In the singularity model (FIG. 12A)(Avner et al., supra; Lyon, supra; Rastan, J Embryol. Exp. Morph. 78:1-22 (1983)), the X-chromosome and various autosomes produce unique X- and A-factors in limited quantities commensurate with their copy number per cell. The complexing of X- and A-factors results in the formation of the putative blocking factor (BF), which binds to and represses the firing of one Xic per cell. In this model, the remaining X's do not bind the singularity and become Xᵢ's by default. The model is elegantly simple—the binding of a single factor achieves both counting and choosing of a single Xₐ. No purposeful selection is required for the Xᵢ. However, while the singularity model neatly explains the ‘n−1’ rule and presence of additional Xₐ's in polyploids, it cannot easily reconcile the latest observations. First, the absence of XCI in XX cells with small Tsix and Xite transgenes is inexplicable. In the singularity model, BF would bind one X or the transgenic autosome, leading to the default inactivation of one or both X's. This was not observed. Moreover, if XCI indeed occurs by default, then X^{Δ}X^{Δ} cells should always form one Xᵢ (not two or none) because the single BF would in theory bind one X, leaving the remaining X for inactivation by default. From a different perspective, given the observation that X^{Δ}X^{Δ} cells can inactivate one or both X^{Δ}'s, the singularity model would also predict that X^{Δ}Y cells inactivate X^{Δ}. This, however, was also not observed.

[0177] These discrepancies instead appeal to a ‘duality model’ (Lee et al., Cell (1999) supra). The mutant phenotypes of X^{Δ}X and X^{Δ}X^{Δ} in the absence of any phenotype in X^{Δ}Y argues one clear point: while Tsix is required to repress XCI, an additional factor is necessary to induce XCI. As proposed, in addition to BF that represses XCI on the future Xₐ, a competence factor (CF) is required to induce XCI on the future Xᵢ. A priori, CF must comprise factors present in XX but not XY cells. Prima facie, an additional female X-chromosome is the single entity which satisfies this criterion, implying that CF is X-linked.

[0178] In the duality model (FIG. 12B), the counting mechanism measures the X:A ratio through specific X- and A-factors, each produced in limited quantities proportional to the chromosome copy number. The act of counting represents a ‘titration’ of X- and A-factors. The A-factors complex with one another and together titrate away one X-factor, the sum of which becomes one BF. Left without A-factor partners, the remaining X-factor(s) becomes CF. The ensuing act of choice reflects the stochastic binding of BF and CF to the two X's, with the BF repressing the Xic on the future Xₐ and the CF inducing the Xic on the future Xᵢ. BF and CF must bind in a mutually exclusive fashion. The duality model differs from the singularity model only in the stipulation that Xᵢ formation requires the purposeful action of CF, rather than being a default process.

[0179] The current data substantiates the existence of a CF. In the duality model, the different outcomes of X^{Δ}Y vs. X^{Δ}X and X^{Δ}X^{Δ} mutants result from the absence of CF in X^{Δ}Y cells and presence in XΔX and X^{Δ}X^{Δ} cells. In X^{Δ}X^{Δ} mutants, chaotic choice is presumed to occur because the Tsix deletions result in loss of mutual exclusion between the binding of BF and CF to the X's (FIG. 12C)(Lee, Nature Genet. (2002), supra). In this model, the binding of both BF and CF to one X and the absence of BF and CF on the other X lead to a confused state in which the X's can either remain active or be inactivated, thereby producing the observed two Xₐ and two Xᵢ phenotypes. The duality model also explains the various outcomes in transgenic cells. In XX cells carrying small Tsix and Xite transgenes, supernumerary copies of the noncoding sequences act as a sink and titrate away BF and CF, resulting in two Xₐ's (FIG. 12D). The high transgene copy numbers of these cell lines make the autosomes more competitive for the factors than the endogenous Xic, explaining why an Xᵢ is rarely, if ever, seen. In XY cells, BF is titrated away by the transgenes without consequence, because ectopic XCI cannot occur without CF.

[0180] Offering further insight into the counting process is the fact that πJL2, πJL3, and pSx7 gave rise to cells competent for XCI while the smaller transgenes failed to induce XCI. This suggests that the larger transgenes harbor another critical element that is missing in the smaller transgenes, possibly CF itself or something that can substitute for it. Further study is necessary to identify and characterize that element within πJL2. How can one reconcile the existence of CF with the Δ65 kb knockout (Clerc et al., Nature Genet. 19:249-253 (1998); Morey et al., Embo J 23:594-604 (2004))? In this knockout, XO and XY cells underwent XCI in the absence of the putative CF. One possible explanation may be that Δ65 kb is a neomorph. Because of the deletion size, regulators of the apposed Chic1 gene might exert ectopic influences on Xist. More likely, the 65 kb region spanning Xist, Tsix, Xite, Tsx, and Chic1 may actually contain additional regulators whose deletion leads to XCI in cis. This idea is consistent with above conclusions of transgene analysis, which also imply additional regulators at the Xic. Thus, Δ65 kb cannot be equated with Xite^{ΔL} nor Tsix^{ΔCpG}.

[0181] A third conclusion of this work addresses the question of where BF and CF might bind. The phenotypes of the knockouts and transgenics argue that BF and CF must interact with elements in or around the promoters of Tsix and Xite (purple bar, FIG. 11A), either directly or through other factors. In the transgene analysis, the promoter regions of the two genes elicited the strongest phenotype (filled purple bars), but the fragments immediately adjacent to them also elicited a counting phenotype (dotted purple bars). Thus, multiple cis-elements within the ˜14 kb region may act cooperatively in counting. Significantly, two enhancers have recently been mapped to this region, including a 1.2 kb element that coincides with the Xite promoter and a bipartite element that flanks the Tsix promoter (Stavropoulos et al., Mol Cell Biol (2005), supra). The idea that BF and CF might bind Tsix enhancers is inherently satisfying, as the fate of each X is indeed determined by whether Tsix expression persists (Xₐ) or is switched off (Xᵢ) in the differentiating cell.

[0182] Finally, the current work demonstrates that counting and choice are molecularly coupled. Although they are genetically separable by virtue of differential effects in Tsix X^{Δ}Y, X^{Δ}X, and X^{Δ}X^{Δ} cells, the observations here indicate shared control elements. Specifically, Tsix and Xite mutations that were known to affect choice (Ogawa et al., supra; Lee et al., Cell (1999), supra; Sado et al., supra; Luikenhuis et al., Mol. Cell. Biol. 21:8512-8520 (2001); Stavropoulos et al., Proc. Natl. Acad. Sci. U.S.A. 98:10232-10237 (2001); Morey et al., Hum. Mol. Genet. 10:1403-1411 (2001); Lee, Nature Genet. (2002), supra) are now also shown to affect counting. In the duality model, counting and choice occur sequentially, with counting representing the titration of X- and A-factors and choice representing the binding of BF to Xₐ and CF to Xᵢ. Thus, counting and choice involve the same set of X- and A-factors and the same noncoding genes. What might these X- and A-factors be? Interestingly, CTCF, Xiaf1, and Xiaf2 have been identified as candidate trans-factors for the choice step (Chao et al., Science 295:345-347 (2002); Percec et al., Science 296:1136-1139 (2002)). In light of the current work, it will be interesting to ask if they have potential roles in counting as well. Future efforts in identifying transacting factors for counting will focus on DNA-binding proteins of the Xite and Tsix enhancers, cis-elements characterized here as having numerator properties.

### Example 2

### Smaller Transgenes of p3.7 and pXite can Arrest Cell Differentiation

[0183] Based on the original discovery, described above, that regions of the Xic can be used to block cell differentiation, I generated smaller fragments of Tsix and Xite to identify the minimal critical region required for counting, pairing, and arrest of cell differentiation. These smaller transgenes are shown in FIGS. 1 and 2, described in Table 1, and summarized below.

ns25 (SEQ ID NO: 21): 1.6 kb DXPas34 fragment within Tsix that contains Repeats A1, A2, and B (see FIG. 30B).
ns41 (SEQ ID NO: 22): 2.4 kb fragment of Tsix that is located immediately downstream of DXPas34 (downstream with respect to Tsix transcription). ns41 is the SalI-BamHI fragment of pCC3.
ns130 (SEQ ID NO: 24): 1.8 kb of Xite as defined in Table I of Stavropoulos et al., (2005) supra. It includes sequences from bp-12,045 to -10,229 with respect to the Tsix major start site.
ns135 (SEQ ID NO: 25) and ns155 (SEQ ID NO: 26): the relevant fragments of each are the 1.2 kb Xite enhancer as defined in Stavropoulos et al., (2005) supra. They include bp-10,234 to -9,010 with respect to the Tsix major start site.
ns132 (SEQ ID NO: 27): 2.5 kb fragment of Xite also as defined in Stavropoulos et al., supra. It includes bp-9,009 to -6,535 with respect to the Tsix major start site.
ns82 (SEQ ID NO: 23): 220 base pair fragment of Tsix promoter.

[0184] As shown in FIG. 26, subfragments ns41, ns25, ns132, ns135, and ns130, which range in size from 1.2 to 2.5 kb, all cause female ES cells to look “undifferentiated” even under differentiation conditions for 5 days. This effect is seen in the absence of feeder cells. This effect is not seen in male ES cells indicating that the effect is sex-specific (FIG. 27). Of these smaller transgenes, ns25 and ns135 are the smallest in size and both contain promoter and enhancer activity for the two noncoding RNAs. Ns25 contains repeats A1, A2, and B of DXPas34, which are described in more detail below in Example 4. For these experiments, transgenic ES cell lines were differentiated into embryoid bodies as described in Lee, Science 309:768 (2005) and EB were photographed, harvested for expression analysis and cell death analysis on the days of differentiation as indicated.

[0185] One noted exception was ns82, which contains only the Tsix major promoter (Table I of Stavropoulos et al., (2005) supra). This fragment does not affect counting or choice, cannot nucleate pairing by itself (as described in detail in Example 3, below), nor can it arrest ES differentiation in females. However, this fragment can enhance the block to differentiation seen with the other fragments. Therefore, ns82 may be used in combination with any of the other fragments described herein to block cell differentiation or to affect counting, choice, or pairing.

### Example 3

### Transient Homologous Chromosome Pairing Marks the Onset of XCI

[0186] The random form of X-chromosome inactivation (XCI) [reviewed in Avner and Heard, Nat. Rev. Genet. 2:59 (2001)] is regulated by a “counting” mechanism that enables XCI only when more than one X is present in a diploid nucleus. A “choice” mechanism then stochastically designates one Xₐ (active X), on which the X-inactivation center (Xic) is blocked from initiating silencing, and one Xᵢ (inactive X), on which the Xic is induced to initiate chromosome-wide silencing. Regulatory elements have been mapped to three noncoding Xic genes, including Xist (Brown et al., Cell 71:527 (1992); Brockdorff et al., Cell 71:515 (1992); Penny et al., Nature 379:131 (1996)), its antisense partner Tsix (Lee et al., Cell 21:400 (1999); Lee and Lu, Cell 99:47 (1999); Sado et al., Development 128:1275 (2001)), and Xite (Ogawa and Lee, Mol. Cell. 11:731 (2003)). Whereas Xite and Tsix together regulate counting and choice (Lee and Lu, (1999) supra; Sado et al., (2001) supra; Lee, Nat. Genet. 32:195 (2002); Morey et al., EMBO J. 23:594 (2004); Lee, Science 309:768 (2005)), Xist predominantly regulates chromosome-wide silencing (Penny et al., (1996) supra; Clemson et al., J. Cell Biol. 132:259 (1996); Marahrens et al., Genes Dev. 11: 156 (1997); Wutz and Jaenisch, Mol. Cell 5:695 (2000)). Interestingly, each gene acts in cis, with Xite activating the linked Tsix allele, Tsix repressing the linked Xist allele, and Xist repressing other genes on the same X.

[0187] Although cis-acting genes dominate the Xic, Xic function must extend in trans. Notably, the choice of Xₐ and Xᵢ always occurs in a mutually exclusive manner, so when one X is designated Xₐ, the other is accordingly designated Xᵢ. The idea of crosstalking is supported by a Tsix^{-/-} knockout, in which choice becomes “chaotic” with the occurrence of 2 Xᵢ, 1 Xᵢ, or 0 Xᵢ per cell (Lee, (2002) supra; Lee et al., Science (2005) supra). Though trans-interaction seems necessary (Lee et al., Nature Genetics (2002) supra, Marahrens, Genes Dev. 13:2624 (1999)), direct evidence has been lacking. In principle, trans-sensing could be accomplished by feedback signaling cascades, diffusible X-linked factors, or direct interchromosomal pairing such as that proposed for T cell differentiation (Spilianakis et al., Nature 435:637 (2005)).

[0188] Because somatic homolog pairing does not generally occur in mammals, I surmised that pairing—should it occur on the X—must take place transiently. Here, I followed the movement of the chromosomes over time using fluorescence in situ hybridization (FISH) in differentiating mouse embryonic stem (ES) cells, a model that recapitulates XCI in culture. I measured the X-X interchromosomal distances for day 0 (pre-XCI), day 2 and day 4 (XCI onset), day 6 ES cells, and mouse embryonic fibroblasts (MEFs) (FIGS. 15A-D). By combining two non-overlapping probes, I obtained 99% X detection rates (single probes gave 85 to 90% rates). Only nuclei with two resolvable signals were scored. For each experiment, 150 to 250 nuclei were scored, and similar results were obtained in three independent tests.

[0189] In wild-type XX cells, the X-X distance was highly dynamic during cell differentiation (FIG. 15 A). On day 0, the interchromosomal distances approximated a normal distribution, suggesting near-randomness. Interestingly, on day 2, a high proportion of cells began to display close X-X distances, as shown by a left shift in the distribution (FIG. 15A) [Kolmogorov-Smirnov (KS) test, P=0.01]. This trend continued into day 4 (P<0.001) and partially returned to baseline on day 6 (P=0.41). The MEF distribution was completely random, somewhat more so than for day 0 ES cells, perhaps reflecting spontaneous differentiation of some ES cells. Cumulative frequency curves (FIG. 15B) showed that day 2 and day 4 displayed the highest frequency of “proximity pairs,” or pairs with normalized X-X distances (ND)<0.2 (<2.0 μl). Among proximity pairs, one-third displayed 0.2- to 0.5-μ separation (FIG. 15C), a fraction greater by factors of 6 and 16 than in day 0 ES and MEFs, respectively. X painting confirmed the presence of two Xs (FIG. 19), thus excluding the possibility of visualizing sister chromatids within XO cells.

[0190] Measurement of interautosomal (A-A) distances at 1C [chromosome 1 (Chr1) centromere], Abca2 (Chr2), and chromosome 3 centromere showed normal distributions at all time points (FIG. 15B and FIG. 20), demonstrating that proximity pairing was not generally observed. To determine the extent of pairing on the X, I tested four bacterial artificial chromosome (BAC) probes in combination with an Xic probe (FIG. 15D and FIG. 21A-C) and found that, whereas Xic movement was constrained by homologous interaction, the flanking regions adopted relatively free positions, with each locus showing near-random distributions across time (FIG. 21A-C). Thus, X-X interactions were restricted to the Xic.

[0191] The pairing kinetics suggested linkage to XCI, which coincidentally initiates between day 2 and day 4 of differentiation. Because Xist RNA up-regulation is the earliest known cytologic feature of XCI (Avner and Heard, (2001) supra), I asked whether pairing could be observed more frequently in Xist⁺ cells. Indeed, Xist⁺ cells showed 46% with X-X association (FIGS. 16 A-B), indicating that pairing occurs just before or during Xist up-regulation. To pinpoint the time frame, the additional temporal markers, Ezh2 and H3-3meK27, were used. These markers accumulate on the Xᵢ shortly after Xist up-regulation during the “early Xᵢ maintenance” phase [reviewed in (Heard, Curr. Opin. Genet. Dev. 15:482 (2005))]. On day 2, trans-associations were significantly enriched in Ezh2⁻ cells and in H3-3meK2⁻ cells relative to Ezh2⁺ and H3-3meK27⁺ cells (FIGS. 16 C-D and FIGS. 22A-B). These results restricted trans-interactions to Xist-expressing cells that have not yet recruited Ezh2 and H3-3meK27, thus demonstrating a very early time frame, well before the XCI maintenance phase.

[0192] We therefore tested the relation of transinteractions to counting and choice, the two earliest steps of XCI, both of which are regulated by Tsix and Xite. It was previously shown that Tsix^{+/-} mice (X^{ΔTsix}X) are disrupted for choice and silence only X^{Δ} (Lee and Lu, (1999) supra; Sado et al., (2001) supra; Morey et al., (2004) supra; Lee, Cell 103:17 (2000)), whereas X^{ΔTsixX}X^{ΔTsix} mice are disrupted for both counting and choice (Lee et al., Nature Genetics (2002) supra; Lee et al., Science (2005), supra). Xite mutations have similarly affected counting/choice (Ogawa and Lee, (2003) supra; Lee et al., Science (2005), supra). X^{ΔXite}X cells showed a marked delay in X-X association (FIGS. 17A-B, and FIG. 23), implying that losing one Xite allele is sufficient to partially disrupt pairing. This partial effect correlated with aberrant choice in X^{ΔXite}X. However, X^{ΔTsix}X cells showed the expected frequency of homologous association, indicating that losing one Tsix allele does not affect pairing. In contrast, X^{Tsix}X^{ΔTsix} cells showed near-random distributions across all time points (FIG. 17B and FIG. 23), which supports the argument that deleting both Tsix alleles is required to abolish pairing. Although not statistically significant, day 6 populations showed a slight left shift suggestive of a delayed or weakened attempt to associate. These data demonstrated that Tsix and Xite are required for pairing and implied a tight link between pairing and counting/choice.

[0193] “Chromosome conformation capture” (3C) was used to learn whether the homologous association represented true physical pairing, (Dekker et al., Science 295:1306 (2002)), whereby two interacting loci can be detected by crosslinking, intermolecular ligation, and polymerase chain reaction. To obtain necessary polymorphisms for 3C, the pairing competent X^{ΔTsix(neo+)}X line was used, in which one Xic is distinguished by Neo (FIG. 17C) (wild-type could not be used because they lack informative polymorphisms within required restriction fragments). Using three distinct primer pairs [Tsix1-N3 (shown), and TSEN2-N1 and Tsix1-N2], I consistently detected physical contact between the two Tsix loci, whereas no contacts were observed between various Tsix and autosomal controls or the incorrectly oriented Tsix2 primer and N3 (FIG. 17D and FIG. 24). The inter-Tsix interaction was strongest on day 4 (FIG. 17E), consistent with FISH analysis. Therefore, inter-Xic pairing indeed underlies homologous association.

[0194] To identify sequences that direct pairing, I introduced Xic fragments into ES cells (FIG. 17A and Table 4) (Lee, Science (2005), supra) and asked whether autosomal insertions could induce de novo X-autosome (X-A) pairing and affect counting/choice. Intriguingly, autosomal pSx7 led to ectopic X-A pairing in females (FIG. 17F), correlating with aberrant counting and XCI initiation in pSx7 females (Lee et al., Science (2005), supra). By contrast, female Xist and Tsx transgenics showed no X-A pairing above background (FIG. 17F), consistent with their normal XCI (Lee et-al., Science (2005), supra). Furthermore, male pSx7 transgenics did not exhibit X-A pairing (FIG. 17F), consistent with their normal counting and XCI suppression (Lee et al., Science (2005) supra).

TABLE 4
Summary of transgenic cell lines and their pairing characteristics.

| | | | X-A | Tg |
|---|---|---|---|---|
| Tg | ES line | XCI | Pairing | Copy |
| pSx7 | ♀sx7.6 | aberrant | + | low |
| | ♂sx7.7 | normal | − | low |
| p3.7 | ♀3.7-11 | aberrant | + | high |
| | ♂3.7-1 | normal | − | low |
| pXite | ♀Xite-11 | aberrant | + | high |
| | ♂Xite-1 | normal | + | high |
| pXist | ♀Xist-8 | normal | − | high |
| pTsx | ♀Tsx-4 | normal | − | high |
| πJL1 | ♂1.4.1 | aberrant | + | high |

[0195] To dissect specific requirements within pSx7, I tested p3.7, the 3.7 kb Tsix fragment deleted in the pairing-incompetent X^{ΔTsix}X^{ΔTsix}. p3.7 was remarkably efficient at inducing de novo X-A pairing in XX cells (FIG. 17F), with 3C analysis confirming direct physical interaction between p3.7 and the X (FIG. 17D). The ectopic pairing paralleled the failure of counting/choice and XCI initiation in p3.7 females (Lee et al., Science (2005), supra). In contrast, p3.7 males did not induce X-A pairing and accordingly did not manifest a counting defect (Lee et al., Science (2005), supra). pXite (a 5.6-kb fragment deleted in the pairing-compromised X^{ΔXite}X) were also tested and showed efficient X-A pairing (FIG. 17F), consistent with pXite's profound effect on counting/choice (Lee et al., Science (2005), supra). Interestingly, pXite males could also initiate pairing, although they did not exhibit ectopic XCI. Because pXite males are thought to lack an X-linked “competence factor” for initiating XCI, I next tested males carrying full-length Xic transgenes (Lee et al., Science (2005), supra) to determine whether pairing and XCI could be achieved together. Indeed, πJL1.4.1 males displayed ectopic X-A pairing (FIG. 17F) and, accordingly, initiated counting/choice and silencing (Lee et al., Proc. Natl. Acad. Sci. U.S.A. 96:3836 (1999)), further supporting the tight linkage between pairing and XCI initiation. These experiments demonstrated that Tsix and Xite, with sequences as small as 3.7 and 5.6 kb, are sufficient to recapitulate pairing and that, in turn, pairing is required for the earliest steps of XCI.

[0196] In transgenic females, I hypothesize that the failure to initiate XCI may be due to a competitive inhibition of X-X interactions by de novo X-A interactions. Indeed, the frequency of X-X interactions was significantly diminished for pSx7, p3.7, and pXite females as compared with wild-type (FIG. 18A versus FIG. 15B). In pSx7 females, X-X pairing rates were less than X-A pairing rates. In p3.7 and pXite females, X-X pairing appeared to be abolished completely (FIG. 18A and FIG. 25), with day 2 and day 4 distribution profiles being indistinguishable from day 0 (FIG. 188B) and <2% of nuclei (background) with ND<0.05 (FIG. 18C). In contrast, X-X pairing remained robust in pTsx and pXist controls (FIG. 25). Therefore, ectopic X-A interactions measurably detracted from endogenous X-X interactions. The frequency of X-X pairing directly predicts the frequency of XCI. I propose that the titration of X-X interactions by ectopic Tsix/Xite accounts for the pervasive failure of counting/choice and XCI in transgenic females.

[0197] On the basis of this work, I postulate that X-X pairing acts upstream of Xist by mediating counting/choice and providing the necessary crosstalk for mutually exclusive XCI. Pairing interactions clearly do not require Xist expression. In our model (FIG. 18D), two Xs assume random independent positions in pre-XCI cells and then pair homologously at the onset of XCI, with Tsix and Xite acting as nucleation centers. The ensuing crosstalking achieves asymmetric marking of one X to become Xₐ and the other to become Xᵢ. With counting/choice reflecting the binding of a “blocking factor” to the Xₐ and the competence factor to the Xᵢ (Lee and Lu, (1999) Supra; Lee et al., Science (2005) supra), pairing ensures that the two factors bind mutually exclusively.

[0198] Remarkably, 3.7 kb of Tsix or 5.6 kb of Xite is sufficient to initiate de novo pairing. Thus, these genes play dual cis-trans roles in XCI by functioning in trans to coordinate pairing/counting/choice and in cis to antagonize Xist. These events may take place simultaneously in time and space. Subtle pairing differences between Tsix and Xite mutants likely reflect length requirements, as indeed X^{ΔXite}X shows weaker pairing than X^{ΔTsix}X, and Xite transgenic males pair better than Tsix counterparts. Consistent with this, full-length transgenic πJL1.4.1 males not only pair well but also initiate XCI. Why do X-A interactions generally outnumber X-X interactions? The multicopy transgene nature might increase the avidity of the autosome relative to the X. The ability of X-A pairing to inhibit X-X pairing now provides a mechanism for failed XCI in Tsix/Xite transgenic females: If pairing were required for proper counting/choice, the failure to pair would pose a specific block to XCI. The proposed regulation by interchromosomal pairing creates a new dimension to the problem of gene regulation and is likely to become a recurrent theme in epigenetic phenomena (Spilianakis et al., (2005) supra; LaSalle and Lalande, Science 272:725 (1996)).

[0199] In order to determine if the smaller transgenes described in Example 2 could also nucleate pairing between chromosomes, I inserted subfragments into autosomes and tested the ability of the autosome to pair with the X. For these experiments, ES cells were harvested on day 0 (undifferentiated) or day 4, dispersed, fixed onto glass slides, and examined by FISH. They were then imaged and analyzed by Improvision software as described below and in Xu et al., Science 311:1149-1152 (2006). FISH was carried out using probes from the XIC (using fragments equivalent to each transgene sequence). As shown in FIG. 28, the smaller transgenes also nucleate de novo “pairing” between the X and the autosome into which the transgenes had inserted. The only exception to this was the ns82 fragment, which only includes the Tsix promoter. (Note that the nomenclature refers to the transgene-particular clone carrying the transgene. For example, ns82-7 refers to clone 7 carrying the ns82 transgene.) These results show that the ectopic X-A pairing inhibits endogenous X-X pairing. I propose that this is why X-inactivation is inhibited and why cell differentiation cannot occur in the female ES cells. Thus, any fragment which causes ectopic pairing between the Xic's could be used to block cell differentiation.

[0200] The following materials and methods were used in the experiments described above.

### ES Cell Culture

[0201] Wildtype male J1 (40XY), wildtype female 16.7 (40XX), and all mutant mouse ES cell lines and their culture conditions have been described previously (Lee and Lu, Cell 99:47 (1999); Lee et al., Nat. Genet. 21:400 (1999); Lee, Science 309:768 (2005)). Transgenic ES lines were maintained under 300 μg/ml G418 selection. ES differentiation was induced by suspension culture for 4 days and withdrawing leukemia inhibitory factor (LIF). On day 4, embryoid bodies were attached to gelatinized plates to promote outgrowth of differentiated cells. Fibroblasts were derived from d13.5 mouse embryos using standard protocols.

### FISH Analysis

[0202] ES clusters were trypsinized into single cells and cytospun on glass slides prior to

paraformaldehyde fixation. DNA and RNA FISH were carried out as described (Lee et al., (1999) supra). Probes were labeled with fluorescein-12-dUTP or cy3-dUTP by nick-translation. pSxn, pSx9, or pTsx sequences were used as probe for the Xic region (Lee, (2005) supra). BAC probes 1C, XC, Xa2, Xa4, and Xf2 were obtained from Open Biosystems. Abca2 BAC was a gift of Drs. Brian Seed and Ramnik Xavier. For specific detection of transgenes, a promoterless Neo fragment was used. For detection of Xist RNA, a single-stranded riboprobe cocktail was used (Ogawa and Lee, Mol Cell 11:731 (2003)). Immuno-DNA FISH was carried out using anti-H3-3meK27 or anti-Ezh2 rabbit polyclonal antibody (Upstate), followed by secondary goat-anti-rabbit antibody conjugated with cy3. Images were taken with the Zeiss axioscope and processed using OpenLab software (Improvision). 2D representation of 3D images were created by merging z-sections of 0.2μ intervals taken across whole nuclei depth. The X-X distances (x) and nuclear areas (A) were calculated using the measurement module in OpenLab.

[0203] Only nuclei with two resolvable X-signals were scored—single-dots were excluded to avoid counting XO cells, which accounted for <<5% of total culture (FIG. 20). Nuclear diameter (d)=2*(nuclear area/π)^{0.5}. Normalized distance (ND)=X-X distance/d. Days 2 through 6 ES nuclei generally had a similar size and shape as compared to day 0 nuclei. There are intrinsic limitations to this methodology. A typical ES nucleus is nearly perfectly round, measuring 10μ in diameter. However, MEFs tend to be ovoid in shape, a point that may give rise to slightly different distribution profiles for MEFs in FIGS. 19A and 20.

### Chromosome Conformation Capture (3C) Assay

[0204] The 3C assay was adapted for mammalian cells (Tolhuis et al., Mol. Cell. 10:1453 (2002)). For the necessary polymorphisms to detect interactions between homologous chromosomes, utilized the pairing-competent X^{ΔTsix(neo+)}X line, in which one Xic is distinguished by Neo (FIG. 21C) was utilized. (Note: WT lines could not be used because there were insufficient naturally occurring informative polymorphisms within the required restriction fragments). To distinguish Tsix^{ΔCpG(neo+)} from X^{WT}, a BamHI digest and primers were used as indicated in FIG. 21C. In brief, single cell suspension of 10⁷ cells was diluted in ES medium, crosslinked with 4% formaldehyde for 10 minutes at room temperature, quenched with 0.125M glycine, pelleted, and washed with PBS. 10⁶ cells were lysed in 10 ml of ice-cold lysis buffer (100 mM Tris-HCL pH8.0, mM NaCl, 0.2% NP-40, protease inhibitor) and the nuclei were pelleted, resuspended in NEB buffer 2 with 0.3% SDS, and incubated for 1 hour at 37° C. with shaking. To sequester SDS, Triton X-100 was added to 1.8% for 1 hour at 37° C. with shaking. The sample was incubated with 400 Units of BamHI overnight at 37° C. with shaking, the enzyme inactivated at 65° C. with 1.6% SDS, and then incubated with 1× ligation buffer (10 ml) and Triton X-100 (1%) at 25° C. with shaking. Ligation was carried out at low DNA concentration (<2.5 ng/μl) with 200 units of T4 DNA ligase for 4 hours at 16° C. Proteinase K was added (100 μg/ml) to reverse crosslinking at 65° C. overnight. The sample was then treated with RNase A (0.5 μg/ml) for 30 minutes at 37° C., the DNA extracted with phenol/chloroform and isopropanol-precipitated. Control samples without crosslinking or without T4 ligase were treated in parallel. <20 ng of template was used in each PCR reaction and each reaction occurred within the exponential phase of amplification to achieve accurate product quantitation.

[0205] For α-globin control templates, PCR products spanning BamHI sites of interest (primer pairs b1/b1R, b2/b2R, b3/b3R, b4/b4R) were digested, mixed at equal molar ratio, and ligated to each other (for βg-βg tests) or ligated to digested pSxn (for βg-Tsix and βg Xite) to create all possible pairwise ligations. Primer pair b2/b4 consistently showed cisinteractions (FIG. 21D), as did b1/b4 and b3/b4 (data not shown). To normalize the Tsix results, the use of any pair gave similar results. For control templates for X-X interactions, pSxn and the Tsix^{ΔCpG} knockout vector were digested, mixed at equal molar ratio, and ligated to create a pool of all possible pairwise ligations. For control templates for X-A interactions, p3.7 was digested and ligated with digested πJL2 (a full-length Xic P1 plasmid (Lee et al., Proc. Acad. Sci. USA 96:3836 (1999))) or ligated to digested β3g PCR fragments (for transgene p3.7-βg interactions). All primers were designed to have annealing temperature of 62-64° C., and all yielded products of the predicted size. All test PCR products were sequenced to confirm specificity and identity. None of the Tsix-βg primer pair combinations gave a specific PCR product. All minus-crosslinking and minus-ligation controls also gave no product. Two to three independent experiments were carried out for each interaction and PCR reactions were repeated at least twice for each experiment. The primers used were as follows:

| | |
|---|---|
| Tsix1(Bam12): | |
| 5′-CTCTGGCCACCTGTCTAGCTG | (SEQ ID NO: 47) |
| Tsix2(DSN35): | |
| 5′-TAGGTACCTAGGCAGATTGC | (SEQ ID NO: 48) |
| Tsix3(Bam13a): | |
| 5′-GGCTGAAGGTGCTGTAGCAAG | (SEQ ID NO: 49) |
| Tsix4(Bam14): | |
| 5′-CTGAGCTCGAACATTGCCCCAC | (SEQ ID NO: 50) |
| Tsix5(Bam11): | |
| 5′-CTAACAAGTGTGAGCCACCTGCC | (SEQ ID NO: 51) |
| Tsix TSEN2: | |
| 5′-CCACCTGTCTAGCTGGCTATCA | (SEQ ID NO: 52) |
| N1(NeoF): | |
| 5′-TTAGCCACCTCTCCCCTGTC | (SEQ ID NO: 53) |
| N2(NeoF2): | |
| 5′-TGTCCGGTGCCCTGAATGAACTGC | (SEQ ID NO: 54) |
| N3(NeoF3): | |
| 5′-ACGTTGTCACTGAAGCGGGAAGGG | (SEQ ID NO: 55) |
| b2(beta2): | |
| 5′-GTTTCCAGGAGGGGTTCAGGTTTA | (SEQ ID NO: 56) |
| b2R(beta2R): | |
| 5′-CACAAACCCAAACACAGATAAATG | (SEQ ID NO: 57) |
| b3(beta3): | |
| 5′-TTCATACACAGGACATCTACACAA | (SEQ ID NO: 58) |
| b3R(beta3R): | |
| 5′-TAAAATACAATCCACCAGTCATAC | (SEQ ID NO: 59) |
| b4(beta4): | |
| 5′-GCAAGGTCCAGGGTGAAGAATAAA | (SEQ ID NO: 60) |
| b4R(beta4R): | |
| 5′-ATTTTGATTTCCTCCTTGGGTCTT | (SEQ ID NO: 61) |

### Statistical Analysis

[0206] The significance of the difference in inter-chromosomal distance distributions were tested using the Kolmogorov-Smirnov (KS) test, a non-parametric test to examine the null hypothesis that two data-sets exhibit the same underlying distribution. The P value was calculated by the statistics software, SPSS 12.0. A P<0.05 was considered statistically significant.

### Example 4

### Role of Transcription in the Regulation of XCI

[0207] Despite their potentially disruptive effects, transposable elements (TEs) have been widely disseminated and now account for nearly 50% of the mammalian genome. Their ubiquity suggests that host genomes may benefit from TEs, although evidence for this has been scant. The X-inactivation center is known for its abundance of TEs. Here, I provide evidence that the 34mer DXPas34 repeat within Tsix is a retrotransposon remnant and establish that this repetitive element functions during X-chromosome inactivation (XCI). DXPas34 contains bidirectional promoter activity, producing overlapping forward and reverse transcripts. Three new Tsix alleles were generated and used to demonstrate that, while the Tsix promoter is unexpectedly dispensable, DXPas34 plays dual positive-negative functions. At the onset of XCI, DXPas34 stimulates Tsix expression as a component of its bipartite enhancer. Once XCI is established, however, DXPas34 becomes repressive and is required for stable silencing of Tsix. These data ascribe a new function to repetitive DNA elements. I propose a scheme by which TEs could be co-opted by nearby genes for epigenetic regulation.

[0208] Since their discovery by Barbara McClintock over 50 years ago, transposable elements (TEs) have been identified in nearly all organisms and account for a large fraction of eukaryotic genomes. Remarkably, transposons and their recognizable remnants now comprise at least 50% of some mammalian genomes (Lander et al., Nature 409:860-921 (2001)) and as much as 90% of plant genomes (SanMiguel et al., Science 274:765-768 (1996)). Because these elements were viewed as genetic parasites, they and their recognizable remnants have frequently been characterized as “junk DNA.” Particularly common in mammals are retrotransposons, a class of TEs that mobilize through an RNA intermediate and require reverse transcription for integration into the genome. Retrotransposons include both short and long interspersed nucleotide elements (SINEs and LINEs, respectively), as well as the endogenous retroviruses (ERV) and LTR families of repeat sequences. Though ancient in origin, TEs still actively transpose in mice and humans (Kazazian, Science 303:1626-1632 (2004)) despite their potentially disruptive and mutagenic effects.

[0209] Why have eukaryotes been so tolerant of transposons, perhaps even promoting their expansion over time? Their propagation in spite of inherent risks suggests that the host genome may actually benefit from mobile TE. In mammals, transposed elements can confer novel regulatory activities to existing genes. For example, they may have introduced novel promoter activities to mouse Lama3 (Ferrigno et al., Nat. Genet. 28:77-81 (2001)) and Agouti (Morgan et al., Nat. Genet. 23:314-318 (1999)). During the oocyte-to-embryo transition, TEs may have been co-opted by the mouse as alternative promoters and first exons for a significant fraction of expressed transcripts, thereby coordinating the synchronous, developmentally regulated expression of a diverse array of genes (Peaston et al., Dev. Cell 7:597-606 (2004)). Further evidence for TE subversion comes from the occurrence of SINEs within >1000 human gene promoters (Oei et al., 2004), their potential for creating novel splice sites (Kreahling and Graveley, Trends Genet. 20:1-4 (2004)), and their contribution to enhancer regulation (Bejerano et al., Nature 441:87-90 (2006)). In these ways, TEs may drive genome evolution and provide a means for rapid adaptation to everchanging environmental demands.

[0210] Because transposition disrupts local chromatin and gene function, evolutionarily stable integration events are known to concentrate in non-coding regions (Lippman et al., Nature 430:471-476 (2004)). The mammalian X-inactivation center (Xic), which contains multiple non-coding genes, has been noted for its abundance of TEs (Chureau et al., Genome Res. 12:894-908 (2002); Migeon et al., Am. J. Hum. Genet. 69:951-960 (2001); Nesterova et al., Dev. Biol. 235:343-350 (2001); Simmler et al., Hum. Mol. Genet. 5:1713-1726 (1996)) and therefore serves as a model to investigate functional interactions between TEs and epigenetic processes. X-chromosome inactivation (XCI) equalizes X-linked gene expression between mammalian males and females (Lyon, Nature 190: 372-373 (1961)) and progresses through a series of steps that include X-chromosome counting, the purposeful choice of one active X (Xₐ) and one inactive X (Xᵢ), and the initiation and establishment of silencing on the designated Xi. These steps are controlled by the noncoding genes, Xite (Ogawa and Lee, Mol. Cell. 11:731-743 (2003)), Tsix (Lee et al., Nat. Genet. 21:400-404 (1999)), and Xist (Borsani et al., Nature 351:325-329 (1991); Brockdorff et al., Nature 351:329-331 (1991); Brown et al., Nature 349:38-44 (1991)), each of which is characterized by TE infiltration.

[0211] Xist produces a large nuclear RNA that is expressed exclusively from the Xi, coats that chromosome in cis (Clemson et al., J. Cell Biol. 142:13-23 (1998)), and directs silencing of the linked chromosome by recruiting heterochromatin (Borsani et al., (1991) supra; Brockdorff et al., (1991) supra; Brown et al., (1991) supra). The antisense gene, Tsix, acts as a binary switch for Xist expression: On the future Xi, the loss of Tsix expression permits the upregulation of Xist and chromosome silencing in cis; on the future Xa, the persistent expression of Tsix during female cell differentiation protects that X from the silencing effects of Xist (Lee and Lu, Cell 99:47-57 (1999); Luikenhuis et al., Mol. Cell Biol. 21:8512-8520 (2001); Stavropoulos et al., Mol. Cell Biol. 25:2757-2769 (2001)). Tsix persistence on the Xa depends on Xite (Ogawa and Lee, (2003) supra; Stavropoulos et al., Mol Cell Biol. 25:2757-2769 (2005)), which cooperates with Tsix to regulate both counting and choice (Lee, Science 309:768-771 (2005)).

[0212] The repressive properties of Tsix on Xist requires the 5′ end of the antisense gene, with evidence implicating either specific DNA elements (Chao et al., Science 295:345-347 (2002); Lee and Lu, (1999) supra; Morey et al., Hum. Mol. Genet. 10:1403-1411 (2001)) or transcription via the major Tsix promoter (Luikenhuis et al., (2001) supra; Sado et al., Development 128:1275-1286 (2001); Shibata and Lee, Curr. Biol. 14:1747-1754 (2004); Stavropoulos et al., (2001) supra). The Tsix^{ΔCpG} knockout (Lee and Lu, (1999) supra) has defined a 3.7 kb critical domain that includes the major Tsix promoter and bipartite enhancer (Stavropoulos et al., (2005) supra), the repeat element DXPas34 (Courtier et al., Proc. Natl. Acad. Sci. 92:3531-3535 (1995); Debrand et al., Mol Cell Biol. 19:8513-8525 (1999)), and CTCF-binding sites with potential function in allelic choice (Chao et al., (2002) supra). Clearly, however, some aspect of antisense transcription is also important, as forced expression (Luikenhuis et al., (2001) supra; Stavropoulos et al., (2001) supra) and premature transcript termination (Luikenhuis et al., (2001) Supra; Sado et al., (2001) supra; Shibata and Lee, (2004) supra) both lead to skewed X inactivation choice. While these analyses have uncovered many potential elements, whether and to what extent each contributes to control of Xist is currently not clear.

[0213] The experiments described below seek to define the specific required elements by generating new knockout alleles within the 3.7 kb Tsix^{ΔCpG} domain. First, to determine whether antisense transcription is actually required, I deleted various promoter fragments of Tsix and found, much to our surprise, that the mutations produced no XCI phenotype. Computational analysis of the remaining sequence were used and identified DXPas34 as a remnant of an ancient retrotransposon with two distinct functions. The molecular characteristics and genetic significance of DXPas34 is reported below herein.

### Results

### Targeted Deletions of the Tsix Promoter do not Impair Tsix Function

[0214] To determine whether transcriptional activity is required for Tsix function, I created deletions around the major Tsix promoter. The major promoter has been mapped to a 276 bp fragment spanning −160 to +116 bp of the Tsix start site (Stavropoulos et al., (2005) supra) [Note: a minor 6 promoter has been described upstream, but its deletion has no consequence for XCI (Ogawa and Lee, (2003) supra; Sado et al., (2001) supra; Stavropoulos et al., (2001) supra)]. Because the immediate flanking regions may also contain crucial elements, two types of promoter deletions were generated, one which removes ˜700 bp of sequence around the start site (ΔPₘᵢₙ) and the other which removes ˜2100 bp that extends up to but does not include DXPas34 (ΔPₘₐₓ). To simplify the targeting effort, both the Cre-Lox and Flp-Frt site-specific recombinase systems (Meyers et al., Nat. Genet. 18:136-141 (1998)) were used to create a pair of nested deletions (FIG. 29A).

[0215] I transfected the promoter targeting construct into mouse embryonic stem (ES) cells, a system routinely used to model XCI in culture. Both XX and XY ES lines were tested in order to detect any potential effects of the mutations on counting and choice. Targeting into the female 16.7 line resulted in two homologous recombinants out of 3000 screened (FIG. 29B). Because 16.7 contains one X-chromosome of Mus castaneus origin (“cast”) and a second X of Mus musculus origin (“129”), we could use restriction fragment length polymorphisms (RFLP) arising from strain-specific differences in DXPas34 repeat number (Avner et al., Genet. Res. 72:217-224 (1998)) to determine which X was targeted in the female cells. In both cases, the 129 allele was targeted (FIG. 29C). Targeting into the male J1 line yielded two homologous recombinants out of 500 colonies screened (FIG. 29D). Transient transfection of targeted cell lines with Cre and Flp recombinases, respectively, yielded ΔPₘᵢₙ and ΔPₘₐₓ (FIGS. 29B,D). The independently isolated clones behaved similarly, so a single representative clone of each deletion type and sex is discussed below.

[0216] To determine their effects on Tsix expression, allele specific RT-PCR analysis based on polymorphic MnlI and ScrFI sites was performed (FIG. 29E). As predicted, Tsix expression from the mutant allele (129) in females was significantly reduced as compared to the wild-type. Tsix expression from the mutant allele in hemizygous male cells was also significantly reduced as determined by real-time RT-PCR analysis (FIG. 29F). Both ΔPₘₐₓ and ΔPₘᵢₙ had a much milder impact on Tsix transcription than Tsix^{ΔCpG}, suggesting that significant promoter activity could be found outside of the ΔPₘₐₓ region (see below).

[0217] To determine whether the promoter mutations affected XCI, male and female cells were differentiated into embryoid bodies (EB) in culture to initiate the XCI pathway and looked for effects on counting and choice. Cells with abnormal counting have been shown to either differentiate poorly or die during differentiation (Clerc and Avner, Nat. Genet. 19:249-253 (1998); Lee, (2005) supra). However, ΔPₘᵢₙ and ΔPₘₐₓ EB in both XX and XY backgrounds differentiated and grew normally, with no quantitative increase in cell death. These observations argued against a defect in counting, a result that was predictable based on the absence of a counting phenotype for Tsix^{ΔCpG} in the hetero- and hemi-zygous states (Lee and Lu, (1999) supra).

[0218] To query effects on choice, the relative allelic contribution to the expression of Xist and the X-linked gene, Mecp2 were examined. Surprisingly, neither ΔPₘᵢₙ nor ΔPₘₐₓ had any effect on allelic choice in the XX cells (FIGS. 29G,H). This result contrasted with that of Tsix^{ΔCpG}, which exhibited completely skewed XCI patterns in the heterozygous female (Lee and Lu, (1999) supra). Thus, although forced Tsix transcription (Luikenhuis et al., (2001) supra; Stavropoulos et al., (2001) supra) or premature Tsix termination (Luikenhuis et al., (2001) supra; Sado et al., (2001) supra; Shibata and Lee, (2004) supra) skews the pattern of XCI choice, transcription initiating from the major Tsix promoter is surprisingly not required for Tsix's regulation of random choice.

[0219] Oddly, however, while the ΔPₘᵢₙ and ΔPₘₐₓ alleles caused no XCI phenotype, their precursor allele, ΔPₙₑₒ, resulted in nonrandom XCI, with inactivation occurring predominantly on the wildtype X, as observed by both allele-specific RT-PCR and FISH (FIG. 29G-I). Therefore, despite the elimination of the 700 bp promoter region, ΔPₙₑₒ behaved oppositely of all Tsix knockout alleles generated to date (Lee and Lu, (1999) supra; Luikenhuis et al., (2001) supra; Morey et al., (2001) supra; Sado et al., (2001) supra; Shibata and Lee, (2004) supra) and more closely resembled Tsix overexpression alleles (Luikenhuis et al., (2001) supra; Stavropoulos et al., (2001) supra), where the mutated X remains preferentially active as cells differentiate. But unlike the Tsix^{EFIα} overexpression allele in which nonrandom XCI was secondary to cell selection (Stavropoulos et al., (2001) supra), ΔPₙₑₒ exhibited a primary defect in choice. No excessive cell death was observed over the course of differentiation (data not shown), indicating that the mutant cells each chose the mutant X as the Xa. These results indicated that deleting the Tsix promoter in combination with insertion of a Pgk-Neo marker created a neomorphic allele. Because Pgk-Neo was inserted in the opposite orientation to Tsix, the phenotype could not have resulted from Neo read-through transcription into Tsix. Rather, a Pgk enhancer linked to the Pgk-Neo construct (McBurney et al., Nucleic Acids Res. 19:5755-5761 (1991); Sutherland et al., Gene Expr. 4:265-279 (1995)) could have created ectopic interactions that bypassed established the normal mechanism of choice (see Discussion).

### DXPas34 is a Conserved Element

[0220] Given that the major Tsix promoter is dispensable for regulation, I focused on DXPas34—a prominent motif comprising the 3.7 kb Tsix^{ΔCpG} sequence not deleted in ΔPₘₐₓ. Consisting of tandem repeats of ˜34 bp in the mouse (Avner et al., (1998) supra; Courtier et al., (1995) supra), DXPas34 harbors binding sites for the chromatin insulator, CTCF (Chao et al., (2002) supra), and contributes to the activity of a bipartite Tsix enhancer (Stavropoulos et al., (2005) supra). However, because early studies indicated that DXPas34 is not conserved outside of the mouse (Avner et al., (1998) supra; Chureau et al., Genome Res. 12:894-908 (2002); Courtier et al., (1995) supra; Debrand et al., Mol. Cell Biol. 19:8513-8525 (1999); Migeon et al., (2001) supra; Nesterova et al., (2001) supra), its functional significance has been unclear.

[0221] To test whether DXPas34 is conserved after all, bioinformatic analysis using mouse, rat, and human Xic sequences were carried out. Interestingly, dot-plot analysis identified a set of heretofore unrecognized repeats in the rat Xic at a location syntenic to mouse DxPas34 (FIG. 30A). The dot-plot also revealed that two distinct repeat clusters are present in this domain: ‘Repeat A’, which corresponds to DXPas34 (Avner et al., (1998) supra; Courtier et al., (1995) supra), and the previously undescribed ‘Repeat B’. Repeat A, the major repeat in mouse, is greatly expanded in mouse and could be further subclassified as A1 and A2. A1 is 34 bp in length corresponds to the repeat unit identified previously (Courtier et al., (1995) supra), and is present in 29 tandem copies in the 129 strain (AgeI to MluI fragment). The A2 repeat unit, which is only 32 bp in length, is found in five tandem copies located between the A1 array and the Tsix promoter. Only one type of Repeat A is found in rat, and it is present in 13 highly degenerate copies. The Mouse A2 consensus and Rat A consensus share the distinctive 6-bp ATTTTA motif with the major A1 repeat of DXPas34. The mouse A2 and the rat A consensus do not contain the GGTGGC motif present in A1. This motif coincides with the core of the CTCF binding sites previously mapped within DXPas34 (Chao et al., (2002) supra). Repeat B, which lies immediately upstream of A2, is 30 bp in length and occurs in only six tandem copies in the 129 strain. In contrast to Repeat A, Repeat B has a 31 bp consensus sequence in rat, where it is expanded to 35 tandem copies. Interestingly, both mouse and rat B consensus sequences contain an inversion of the CTCF-motif (5′-GCCACC-3′) as well as a nearby partial inversion (CCACT) (FIG. 30B).

[0222] We next compared mouse and human sequences. Wile previous analysis had detected three regions of homology between mouse and human (R1, R2, R3 (Lee et al., (1999) supra)), no homology was obvious around DXPas34. In fact, human TSIX possesses a 14-kb insertion between R2 and R3 that does not occur in the mouse, where R2 and R3 are contiguous (FIG. 30C). Because the mouse is phylogenetically more distant to human than to rat, it was expected that any potential human DXPas34 element and the adjacent Repeat B might easily escape detection. Therefore, degenerate Repeat A and B search strings for closer inspection were developed and showed that, although the B-motif showed no obvious orthologue in human TSIX, a closely related A-cluster consisting of 16 base-pairs (bp) that span the CTCF recognition site was evident downstream of the human TSIX start site (FIG. 30C-D). This element is repeated seven times, oriented in the same direction, and dispersed across a 3 kb domain between R2 and R3. Repeat B of mouse and rats also contains the same 16-bp CTCF-containing domain. A general search for this type of co-oriented, highly clustered repeat array uncovered no other at the Xic/XIC.

[0223] On the basis of this analysis, I conclude that DXPas34 is indeed conserved among mammals in the following manner: (i) the DXPas34 region is actually composed of two distinct but related repeat clusters, Repeat A (within the originally described DXPas34) and Repeat B (adjacent to the original DXPas34). These repeats are found in at least two species of mammals. (ii) Rodent Repeat A is a composite of three regions, including a central 16-bp CTCF-containing domain, an upstream 11-bp domain, and a downstream 6-bp ATTTTA domain. (iii) Human Repeat A appears more compact, consisting only of the 16-bp CTCF-containing domain without obvious 11- or 6-bp flanking domains. (iv) Repeat B, present in mouse and rats, contains an inverted, partial CTCF motif (GGNGG).

### Origins of DXPas34 in an ERV Retrotransposon

[0224] In mammals, at least 575 families of repetitive DNA elements are known to exist (Jurka et al., Genome Res. 110:462-467 (2005)) (http://www.girinst.org/repbase/update/index.html). While testing DXPas34's conservation among mammals, I made the unexpected discovery that the human A-repeats are part of larger retrotransposon units occurring in tandem within the 14 kb gap between R2 and R3 (FIG. 30C-D). Intriguingly, five of the seven Repeat A motifs resided within LTR/ERV or SINE/Alu-subclasses of repeat elements, suggesting that DXPas34 may have descended from ancient retrotransposons. To investigate this further, I asked whether the motifs in FIG. 30B were generally present in rodent and human repetitive elements or whether they were found only in specific families (the rodrep.ref and humrep.ref files from RepBase10.11, obtained from http://www.girinst.org/server/RepBase/index.php). The 16-bp CTCF core domain of human Repeat A matched three repetitive elements in the human database, including a hAT-type DNA repeat element, MER45R, and two related endogenous retroviral elements (ERV), ERVL and HERVL (FIG. 30E). Likewise, mouse Repeat A contained the same 16-bp CTCF domain (FIG. 30B) and matched the corresponding MER45R, MERVL, and RatERVL sequences in the rodent database. [Notes regarding terminology: (i) Although LTRs represent the ends of endogenous retroviruses (ERV), LTR and ERV elements are subclassified separately in the RepBase; (ii) The ‘H’ in HERVL refers to ‘human’, while the ‘M’ in MERVL refers to mouse]. Elements shared by the human and mouse databases represent ancient repeats that predated the divergence of primates and rodents.

[0225] Scrutiny of the context of these alignments led to another surprising finding: The 16-bp CTCF domain was not the only region of homology. In fact, the upstream 11-bp domain upstream of the mouse A1 core (FIG. 30B) also matched the upstream sequences in HERVL and MERVL. These matches occurred in the Integrase-coding region of endogenous retroviruses (Benit et al., J. Virol. 73:3301-3308 (1997)). Thus, DXPas34 and the ERVs aligned at two contiguous domains, the 16-bp core domain and the 11-bp upstream domain. While the probability of carrying the 16-bp motif within one element is ˜2.1×10−9 (considering all nucleotide permutations, 4⁻¹⁵×2⁻¹), the probability of carrying both the 11-bp and 16-bp motifs is 2.8×10⁻¹⁴ ([4⁻¹⁵×2⁻¹]×[4⁻⁸×2⁻¹×1⁻¹×1⁻¹]). This is a very improbable phenomenon, as the chance of the coincidence is once in 2.8×10¹⁴ nucleotides−five orders of magnitude greater than the size of the mammalian genome. These arguments therefore supported kinship between DXPas34 and HERVL/MERVL retrotransposons.

[0226] To test this hypothesis, two analyses were carried out. First, I reasoned that if DXPas34 were derived from MERVL, then hits in the mouse genome should be MERVL-related. Indeed, a sampling of mouse Chromosome 3 (160 Mb) uncovered 48 hits at a level of 5 mismatches or fewer. Significantly, 43 out of 48 were recognized by Repeatmasker as MERVL-related, based on the Mouse Genome Table Browser (http://genome.ucsc.edu/cgi-bin/hgTables). For the remaining five, a closer inspection revealed that at least one also bore resemblance to MERVL but was not recognized by Repeatmasker as such. This conclusion was based on alignment of a 227-bp context enclosing the pattern match with MERVL using the BAST-2-sequence alignment method (http://ncbi.nlm.nih.gov/blast/b12seq/wblast2.cgi). A sampling of the X-chromosome revealed 50 hits at 5 or fewer mismatches in the 165 Mb region (excluding hits within DXPas34 itself). Of the 50 hits, 48 were similarly shown to be MERVL-related. A query of the entire mouse genome yielded a total of 846 pattern matches to DXPas34. Based on extrapolation of these results, of these matches, approximately 795 would be in MERVL sequences. Thus, of all hits identified by DXPas34 in the mouse genome, ˜95% occur within sequences annotated as MERVL.

[0227] Second, if DXPas34 were derived from MERVL, the 16 bp+11 bp string should identify no other repeat elements in RepBase. Searches of the RepBase using the fused 11+16 bp motif, 5′-GTGAYNNCCCAGRTCCCCGGTGGCAGG-3′ (SEQ ID NO: 90) were performed. In the human database, this 27-bp sequence matched only HERVL and no other types of retrotransposons at a stringency of four or fewer mismatches (FIG. 30E; Note that the 11-bp motif is present in the HERVL sequence). In the rodent database, it similarly matched only the corresponding RatERVL and MERVL and no other retrotransposons at a stringency of five or fewer mismatches (FIG. 30E). [Note: This search did not identify MER45R because MER45R matched only the 16-bp motif, not the 11-bp motif. Thus, the 27-bp search yielded a more stringent and specific result]. To determine the probability with which these matches could have occurred by chance alone, Monte Carlo analysis was performed using a statistical method independent of the way the matches were found. I shuffled bases in the 27-bp motif and tested whether the randomized 27-bp string (with an otherwise identical base-composition) would find matches in RepBase at the same stringency and frequency. In a test of 100 randomized permutations of the 27-bp pattern, no matches were observed in the rodent repeat database at a stringency of four or fewer mismatches. Importantly, this was qualitatively similar to the match between DXPas34 and HERVL. Only 3 out of 100 permutations gave hits at five mismatches, which is qualitatively similar to the overall fit with rodent ERVL. Taking these data together, I conclude that the HERVL, RatERVL, and MERVL hits identified by DXPas34 were not the result of chance.

[0228] In sum, among 575 families of repetitive DNA, DXPas34 specifically resembles ERV retrotransposons (HERVL, RatERVL, and MERVL). This sequence similarity may result from DXPas34's origin in one or a small number of elements in the ERV family of retrotransposons. Given the detectable level of conservation between rodents and humans, it is very likely that DXPas34 emerged by the time of the primates-rodents divergence some 60-80 million years ago.

### Novel Activities Within DXPas34

[0229] LTR/ERV, like other mammalian retrotransposons, often possess promoter activity and may be transcribed at low levels from both strands (reviewed in (Kazazian, (2004) supra)). A promoter activity within DXPas34 could potentially substitute for the loss of the major Tsix promoter in ΔPₘᵢₙ and ΔPₘₐₓ and explain their minimal phenotype. Indeed, I found that DXPas34 could serve as promoter when placed in its native orientation in a luciferase reporter assay (FIG. 31A). Consistent with this, Tsix cDNAs have been found to initiate within DXPas34 (Shibata and Lee, Hum. Mol. Genet. 12:135-136 (2003)). To look for associated transcripts, I carried out strand-specific RT-PCR in ES cells and observed the expected antisense transcripts downstream of DXPas34 (FIG. 31B, position 1). Intriguingly, between DXPas34 and the Tsix promoter (position 2), transcription in the reverse (sense) as well as forward (antisense) orientations was observed. This novel reverse transcript was less abundant than Tsix RNA, proceeded through a ˜3 kb region (positions 3 and 4), and terminated near position 5. Using a primer at position 2, 5′ RACE products revealed multiple transcription initiation sites within DXPas34, each coincident with a discrete Repeat A1 unit (FIG. 31C). Therefore, each A1 Repeat unit may serve as an origin of transcriptional activity. The forward and reverse transcriptional units are referred to as Dxpas-f and Dxpas-r, respectively.

[0230] LTR/ERVs are known to be transcribed by RNA Pol II (Havecker et al., Genome Biol. 5:225 (2004)). Because the Repeat A1 units do not bear obvious resemblance to Pol II promoters, I asked which RNA polymerase is actually responsible for transcription of Dxpas-r by treating undifferentiated ES cells for 4 hours with either α-amanitin or tagetin, which specifically inhibit Pol II or Pol III, respectively. Strand-specific RT-PCR showed that the Dxpas-r RNA was severely diminished in α-amanitin-treated cells, while it is unaffected in tagetin-treated cells (FIG. 31D), arguing that Dxpas-r is transcribed by Pol II. Treatment with α-amanitin for an additional 4 hours (8 hours total) also abolished Tsix expression (FIG. 31D, α4 vs. α8), indicating that Pol II also transcribes Tsix and that this transcript has a longer half-life. These results support the conclusion that DXPas34 possesses bidirectional Pol II activity, providing further evidence that Repeat A resembles an LTR/ERV retrotransposon.

[0231] I then examined the developmental profile of Dxpas-r by analyzing undifferentiated (day 0) ES cells, differentiating EB (day 4), and fully differentiated mouse embryonic fibroblasts (MEFs). Interestingly, Dxpas-r's expression pattern was similar to that of Tsix (FIG. 31E): Expression was most robust on day 0, diminished by day 4, and absent in MEFs. This expression pattern correlated precisely with the reported methylation profile of DXPas34, which is unmethylated in ES cells and hypermethylated on the Xₐ of differentiated cells (Avner et al., (1998) supra; Courtier et al., (1995) supra), and the status of a recently described ES-cell-specific DNase I hypersensitive sites in DXPas34 (Luikenhuis et al., (2001) supra; Stavropoulos et al., (2001) supra; Stavropoulos et al., (2005) supra).

### Dual Positive-Negative Regulation of Tsix by DXPas34

[0232] In light of these discoveries, I asked whether DXPas34 plays a role in XCI. Although several other Tsix knockout alleles have included DXPas34 (FIG. 32A), a deletion strictly of this 1.6 kb element had not been created previously (Debrand et al., (1999) supra; Lee and Lu, (1999) supra; Luikenhuis et al., (2001) supra; Sado et al., (2000) supra). Therefore, the necessity of DXPas34 itself for XCI regulation has remained unclear. Aa targeted deletion of Repeat A1 in XX and XY cells was created, obtaining two correctly targeted male clones out of 300 colonies screened and one correctly targeted female clone out of 3000 (FIG. 32B). The Neo marker was then removed by transient transfection with Cre (FIG. 32B-C, right most lanes) and RFLP analysis confirmed the 129 allele was targeted in the XX line (FIG. 32D). For both male and female cells, clones with and without the neomycin marker behaved similarly, so a representative clone without the neomycin marker is discussed. Deleting DXPas34 resulted in a significant reduction of Tsix expression, similar to that in the Tsix^{ΔCpG} allele (FIG. 32E). These results demonstrated that DXPas34 is a positive transcriptional regulator of Tsix, in accordance with the fact that DXPas34 comprises part of the Tsix bipartite enhancer (Stavropoulos et al., (2005) supra). It was noted that deleting DXPas34 diminished but did not completely eliminate expression of Dxpas-r (FIG. 32F), possibly because of minor Dxpas-r start sites mapped by RACE to positions just outside the deleted region.

[0233] ΔDXPas34 exerted no obvious effects on XCI counting in the hetero- and hemi-zygous states, as all XX and XY clones grew and differentiated normally without elevated cell death (data not shown). By contrast, ΔDXPas34 produced clear effects on XCI choice and recapitulated the nonrandom XCI phenotype associated with Tsix^{ΔCpG}. In the heterozygous ΔDXPas34/+ cell line, allele-specific analysis of Xist and Mecp2 showed biased expression of the M. castaneus alleles (FIG. 33A-C). The bias may be somewhat milder for ΔDXPas34 than ΔCpG, perhaps more reminiscent of the inabsolute skewing seen for Xite+/−heterozygotes (Ogawa and Lee, (2003) supra). Like the Tsix^{ΔCpG} and Xite^{ΔL} heterozygotes, the ΔDXPas34 EB also did not exhibit elevated cell death when compared to wildtype XX cells (data not shown), suggesting that the nonrandom XCI patterns was due to a primary effect on the choice function of Tsix rather than a secondary effect of cell loss. Thus, the nonrandom XCI caused by Tsix^{ΔCpG} could mainly be attributed to the loss of DXPas34, rather than to promoter loss.

[0234] A distinct paradoxical effect of deleting DXPas34 during late days of differentiation was uncovered in these experiments. In heterozygous females, deleting DXPas34 led to an apparent derepression of Tsix as measured at the ScrFI polymorphic site by allele-specific RT-PCR (FIG. 34A). This de-repression was first evident on day 4 of differentiation and became sufficiently robust on day 12 that the 129 (mutated) Tsix transcripts greatly exceeded the contribution from the wild-type castaneus allele. This flip in the relative ratio could be due to either a true increase in 129 transcripts or rather to a precipitous drop in the castaneus transcripts (which would therefore give the appearance that the 129 transcripts increased over time). To distinguish between the possibilities, quantitative, allele-specific RT-PCR was carried out using the housekeeping gene, Rpo2, as an internal calibrator. In wildtype XX cells, both the 129 and castaneus Tsix transcript levels decreased significantly from days 0 to 12 as expected (FIG. 34B). However, in ΔDXPas34 cells, Tsix from the mutant (129) chromosome actually increased over time. In the same cells, however, the wild-type castaneus chromosome behaved similarly to the castaneus chromosome in wildtype cells, showing the expected down-regulation of Tsix once XCI was complete. These observations demonstrated that, during the establishment and maintenance phases of XCI, DXPas34 is required to stably repress Tsix transcription. Thus, DXPas34 serves two sequential functions with respect to Tsix: Stimulation of antisense transcription at the onset of XCI, followed by stable silencing of Tsix after XCI is established.

[0235] Note, however, that the de-repression of Tsix during late-stages did not reverse XCI. I believe that this is due to the ES cells' having passed the “reversible phase” of XCI (Wutz and Jaenisch, Mol. Cell. 5:695-705 (2000))—that is, loss of Tsix expression may be necessary but not sufficient to reactivate Xist. These results suggest that the ancient MERVL retrotransposon may have been usurped to play both activating and repressive roles on Tsix regulation. I propose that DXPas34 is a dual regulator of Tsix expression, with its activating role occurring first and its repressive role occurring after the establishment of XCI.

### Discussion

### DXPas34 Originates in an LTR/ERV Retrotransposon

[0236] We have provided evidence that DXPas34 originated from an LTR/ERVL retrotransposons. DXPas34 itself consists of two recognizable clusters of related repeats, Repeats A and B. Of 575 repeat families represented in RepBase, these repeats specifically matched the HERVL, RatERVL, and MERVL families. Sequence matches to these related endogenous retroviruses occur in the 11-bp upstream domain of Repeat A, the 16-bp central domain of Repeat A, and the GGNGG core of Repeat B. Interestingly, the 16-bp domain contains the consensus for the chromatin insulator, CTCF, previously shown to bind mouse DXPas34 (Chao et al., (2002) supra). The sequence similarity between DXPas34 and the ERV repeats is apparently not a random occurrence, as the probability of this coincidence is once in 2.8×10¹⁴ nucleotides−five orders of magnitude greater than the size of the mammalian genome. Thus, I propose that DXPas34 originated from one or a small number of ERVs.

[0237] ERVs arose in mammals more than 70 million years ago, prior to the divergence of simians and rodents (Benit et al., (1999) supra). Today, some 5,000-20,000 copies of HERVL and MERVL are present in the human and mouse genomes. Previous work had shown that retrotransposons are subject to extensive internal expansion of GC-rich repeat units in mouse (Bois et al., Genomics 49:122-128 (1998); Bois et al., Mamm. Genome 12:104-111 (2001)). The GC-richness of present-day mouse DXPas34 may indicate that a similar infiltrative process occurred at this locus. It seems likely that the retroviral elements which ultimately gave rise to DXPas34 underwent extensive degradative mutagenesis and repeat expansion over the past 80-100 million years, after the point of primate-rodent divergence. This degenerative process perhaps preserved only those sequences which fortuitously serve some function at the primordial Tsix, rendering DXPas34 minimally recognizable today as a former member of the LTR/ERV retrotransposon family.

### A Novel Function for Junk ‘DNA’ in Epigenetic Regulation

[0238] Genetic analysis of DXPas34 performed herein now ascribes novel function to such repetitive elements historically regarded as ‘junk DNA’. DXPas34 displays bidirectional transcription and plays two roles in the epigenetic regulation of Tsix. Using a combination of bioinformatic, molecular, and genetic techniques, I have placed its role in the context of other 5′ Tsix regulators. In light of previous work showing that forced Tsix expression results in a gainof-function allele (Luikenhuis et al., (2001) supra; Stavropoulos et al., (2001) supra), I had expected a Tsix null allele and skewed XCI choice upon deleting the promoter. However, neither ΔPₘᵢₙ nor ΔPₘₐₓ had any obvious effect on Tsix's regulation of Xist despite a significant decrease in antisense expression. Thus, although transcription through Tsix is sufficient to block Xist function, transcription from the major promoter is not absolutely required for random choice. Through Dxpas-f transcription, DXPas34 rescues the loss of transcription initiation from the major Tsix promoter, with contribution from upstream initiation sites possibly also playing a role (Ogawa and Lee, (2003) supra; Sado et al., (2001) supra). In the reverse direction, Dxpas-r transcription is readily detected and has developmental dynamics similar to that of Tsix, perhaps thereby also playing a role in Tsix regulation.

[0239] The knockout analysis clearly shows that DXPas34 has both positive and negative effects on Tsix. Previous work has revealed that Tsix is regulated by two enhancers, a bipartite enhancer that contains DXPas34 and an upstream enhancer embedded within Xite (Ogawa and Lee, (2003) supra; Stavropoulos et al., (2005) supra). Consistent with the fact that DXPas34 is critical for bipartite enhancer action (Stavropoulos et al., (2005) supra), I have now shown that its deletion results in a dramatic loss of Tsix transcription from the major promoter, indicating that DXPas34's positive regulatory influence is achieved through its action as enhancer. Unexpectedly, its deletion also results in a late-stage re-activation of Tsix in cis, indicating that DXPas34 must also act in the stable repression of the antisense gene. Thus, ironically, DXPas34 has also become a first candidate repressor of Tsix. These roles may be conserved in humans as well, as bidirectional transcription has also been detected from the syntenic region of TSIX(Chow et al., Genomics 82:309-322 (2003)).

[0240] In the context of available data, our current work leads to a three-step model in which two enhancers and two functions of DXPas34 act in sequence to control distinct aspects of Tsix dynamics (FIG. 35A). With ΔDXPas34's effects are already evident in undifferentiated ES cells, I propose that the bipartite enhancer acts in pre-XCI cells to achieve biallelic Tsix expression. By contrast, the Xite enhancer works primarily at the onset of XCI, as its deletion has little effect on Tsix before XCI but results in a premature loss of Tsix expression during XCI (Ogawa and Lee, (2003) supra). (Note: The Xite enhancer may also facilitate Tsix expression in pre-XCI cells, but this effect has not been uncovered so far by genetic analysis.) That is, while the bipartite enhancer is required for de novo expression of Tsix, the Xite enhancer is necessary for persistent Tsix expression on the future Xₐ. Therefore, the future Xₐ and Xᵢ are distinguished by the action of the Xite enhancer, with the enhancer acting asymmetrically on the Xₐ and not on the Xᵢ. Following the establishment of XCI, Tsix expression is itself extinguished. I propose that this repression requires the late-stage second function of DXPas34. Given the existence of Dxpas-r transcripts, this antiparallel transcription may suppress Tsix in a manner similar to Tsix-mediated antisense repression of Xist expression. In the context of this model, the gain-offunction ΔPₙₑₒ phenotype may be a direct consequence of an ectopic Pgk-Neo enhancer that bypasses a requirement for Xite. By being upstream of Dxpas-f transcription, the ectopic enhancer could short-circuit endogenous regulatory networks and create a constitutively persistent Tsix allele.

[0241] While the effects of the heterozygous deletions on random choice are clear, the current work does not address the effects of ΔPₘᵢₙ, ΔPₘₐₓ, ΔPₙₑₒ, and ΔDXPas34 on other aspects of XCI regulation, such as X-chromosome counting, the mutual exclusiveness of choice, and XCI imprinting. In the case of Tsix^{ΔCpG}, an aberration in counting became evident only in homozygous knockout cells (Lee, (2002) supra; Lee, (2005) supra), so homozygosing the promoter and DXPas34 deletions may uncover a role in other (and no less important) aspects of XCI regulation.

[0242] Finally, the possible evolutionary origin of DXPas34 in endogenous retroviruses (ERVs) remains intriguing. With each retrotransposon being a self-sufficient gene expression module containing promoters, enhancers, and insulators (Gerasimova and Corces, Curr. Opin. Genet. Dev. 6:185-192 (1996); Willoughby et al., J. Biol. Chem. 275:759-768 (2000)), each insertion introduces a new repertoire of regulatory elements that could be utilized by genes at the site of integration. We suggest that a fortuitous ERV insertion into the primordial Tsix gene led to a co-opting of the element by the Xic to regulate Tsix (FIG. 35B). Indeed, the DXPas34 element contains promoter, enhancer, and insulator activities that have each been proposed as components of the regulatory machinery (Chao et al., (2002) supra; Stavropoulos et al., (2005) supra). Over time, the ERV might have lost nearly all of its original sequences, excepting those with beneficial effects on Tsix. Such beneficial elements might then be re-duplicated to yield the repetitive structure seen today at DXPas34. DXPas34 therefore adds to a growing list of possible functions carried out by TEs formerly considered junk DNA (Ferrigno et al., Nat. Genet. 28:77-81 (2001); Morgan et al., (1999) supra; Oei et al., Genomics 83:873-882 (2004); Peaston et al., (2004) supra). Others have noted that TEs exhibit a commanding presence at other epigenetically regulated loci such as autosomally imprinted domains of plants and mammals and centromeres of fission yeast and plants (Cain et al., Nat. Genet. 37:809-819 (2005); Lippman et al., (2004) supra; Noma et al., Nat. Genet. 36:1174-1180 (2004); Seitz et al., Nat. Genet. 34:261-262 (2003); Sleutels and Barlow, Academic Press, San Diego, Calif. pp. 119-154 (2002); Volpe et al., Science 297:1833-1837 (2002)). Thus, TE-associated elements may comprise a general mechanism of epigenetic gene control in fungi, plants, and mammals. Accordingly, any of the minimal DXPas34 consensus motifs shown in FIG. 30B (SEQ ID NOs: 28-32 and 40), or multimers thereof, or any ERV derived multimer of the canonical sequence can be used to inhibit cell differentiation.

[0243] The following materials and methods were used for the experiments described above.

### Bioinformatic Analysis

[0244] Interspecies sequence comparisons were performed using dot-plot methods from the GCG Software Package (http://www.accelrys.com/products/gcg/). Window size and stringency parameters were adjusted to generate the most visible signal above the background. When repeat regions were suggested by horizontal or vertical rectangular areas, dot-plots of the probable repeat region against itself were performed. This generated plots with lines parallel to the diagonal from which it was estimated the total number of direct repeat copies as well as the length of the repeat unit (bp). In order to find the best repeats at the base pair level within a cluster of tandem repeats the following programs were used: Repeat (GCG package), Equicktandem (EMBOSS package http://emboss.sourceforge.net/ and Etandem (EMBOSS). A cluster was then divided up into individual repeats based on this information. Web implementations of ClustalW (http://www.ch.embnet.org/software/ClustalW.html and http://www.ebi.ac.uk/clustalw/) were used to align the individual repeats. The alignments were used to determine a consensus sequence. TEs present in the human, rat and mouse sequences were identified using the Repeatmasker web program (http://www.repeatmasker.org/cgi-bin/WEBRepeatMasker). Searches for additional DXPas34-like sites in the mouse genome by BLAST search were performed using either the 34 bp mouse A1 consensus sequence (FIG. 30B) or a 1056 bp fragment (bp 139145-140200) that includes the DXPas34 region against the mouse genome (http://www.ncbi.nlm.nih.gov/genome/seq/MmBlast.html) or the human genome (http://www.ncbi.nlm.nih.gov/genome/seq/HsBlast.html). The parameters were set to use blastn, the current reference contigs and an Expect value of 10 so that shorter hits with mismatches would be recovered as well as perfect hits. The human Repeat A pattern was based on previously described CTCF binding motifs (Bell and Felsenfeld, Nature 405:482-485 (2000); Chao et al., (2002) supra; Hark et al., Nature 405:486-489 (2000)). I searched for the degenerate repeat consensus using the pattern matching program Fuzznuc (EMBOSS package), which allows the specification of the number of mismatches allowed as well as consideration of the forward and/or complementary strand. I analyzed the pattern matches list from the Fuzznuc program applied to human genomic sequence (build 35 from http://www.ncbi.nlm.nih.gov/Ftp/) to determine the frequency of finding at least 7 pattern matches in the same orientation within a 3 kb region without any matches in the opposite orientation.

### Cells Lines and Targeted Mutagenesis

[0245] Male J1 (40XY) and female 16.7 (40XX) ES cell lines and culture techniques have been described previously ((Lee and Lu, (1999) Supra) and references therein). 16.7 carries X chromosomes of 129 and Mus castaneus origins. To target the Tsix promoter, an EcoRV-BamHI fragment (bp 77,816-81,950 of Genbank X99946 (Simmler et al., Mamm. Genome 4:523-530 (1993))) and a NheI-KpnI fragment (bp 70,569-77,118) were each cloned into pGEM-7Zfy(+), forming pSA and pLA. These plasmids were digested with AgeI and SacI respectively, and synthetic FRT sites comprised of two annealed oligos (DEC1 and DEC2 for pSA and DEC3 and DEC4 for pLA) were inserted, forming pSA-FRT and pLA-FRT. Each synthetic FRT site contains a BamHI restriction site. Oligo sequences were:

(SEQ ID NO: 62)

| | |
|---|---|
| DEC1: | GAAGTTCCTATTCTCTAGAAAGTATAGGAACTTCGGATCCAGCT |

(SEQ ID NO: 63)

| | |
|---|---|
| DEC2: | GGATCCGAAGTTCCTATACTTTCTAGAGAATAGGAACTTCAGCT |

(SEQ ID NO: 64)

| | |
|---|---|
| DEC3: | CCGGGAGTTCCTATTCTCTAGAAGTATAGGAACTTCGGATCC |

(SEQ ID NO: 65)

| | |
|---|---|
| DEC4: | CCGGGGATCCGAAGTTCCTATACTTTCTAGAGAATAGGAACTTC |

[0246] The assembled homology arms with FRT sites were sequenced to determine FRT site orientation. Homology arms were liberated from pSA-FRT and pLA-FRT and ligated into the NotI and NheI sites in pPGK-neo-BpA-lox2-dTA, a generous gift of Phil Soriano. The resulting targeting construct, pDECKO, was linearized with PvuI, and 40 μg of linearized DNA were transfected into ˜10⁷ ES cells using Lipofectamine 2000 (Invitrogen). Lipofection complexes were left in contact with ES cells for 8 hours. Transfected cells were selected with 300 μg/mL G418 and resistant colonies were picked on days 7-9 of selection. Targeted clones were then transfected with either Cre or FLP encoding plasmids and neomycin sensitive clones were examined by Southern blot to identify correct excision events. Probe 1 is a PCR fragment (bp 82,247-82,615) amplified with primers:

| | | |
|---|---|---|
| Ext1: | CACATGAGGGCATAGCCGCATTC | (SEQ ID NO: 66) |
| Ext2: | CCTGGCATAAGAAATCTTGAGGAT | (SEQ ID NO: 67) |

Probe 2 is a 1.4 kb MluI-NdeI restriction fragment (bp 79,949-81,461)

[0247] The targeting construct for ΔDXPas34 (pKO3) consists of a 2 kb MluI-BamHI fragment (79949-81950 of Genbank X99946) cloned into the SalI site of pLNTK (Gorman et al., Immunity 5:241-252 (1996)). The resulting plasmid was linearized with XhoI and a 6.6 kb BamHI-AgeI fragment (71,753-78,396) was added, creating pKO3. Approximately 10⁷ ES cells were electroporated with 40 μg of pKO3 linearized with PvuI. Colonies were picked after 7-9 days selection with 300 μg/mL G418 and 2 μM gancyclovir. Correctly targeted clones were then transfected with pMC-CreN and neomycin-sensitive clones were analyzed by Southern blot.

### RNA/DNA FISH

[0248] RNA/DNA FISH was performed as described previously (Lee and Lu, (1999) supra). For detection of the 129 X in the female ΔPₙₑₒ line, a 2 kb Neo fragment (SalI-XhoI from pGKRN) was labelled with Cy3-dUTP (Amersham) by nick-translation (Roche). For detection of the castaneus X in the female ΔDXPas34 line, a 1.2 kb DXPas34 fragment (AgeI-SalI from pCC3) was used. Xist RNA was detected with P1 plasmid, pSx9, labelled with FITC-dUTP (Roche).

### RT-PCR

[0249] Strand-specific RT-PCR was performed using primers as shown in Table for each position. All RT reactions were performed using M-MLV reverse transcriptase and 3 μg of total RNA isolated from undifferentiated male ES cells using Trizol (Invitrogen). Reactions were carried out at a temperature of 50° C. to avoid non-specific priming. PCR was performed using the following conditions: 95° C., 3 minutes; (95° C., 45 seconds; 55° C., 45 seconds; 72° C., 1 minute) for 38 cycles, followed by a 10 minute extension at 72° C. Allele specific RT-PCR for Xist, Tsix, and Mecp2 was performed as described previously (Stavropoulos et al., (2001) Supra). For quantitative, allele-specific RT-PCR, 3 μg of RNA were reverse transcribed at 50° C. using primers ns66 and Rpo2B. Rpo2 was amplified with primers Rpo2-1A (Stavropoulos et al., (2001) supra) and Rpo2B, and detected with Rpo2A. Tsix was amplified with ns66 and ns67 and detected with ns60. Pilot experiments determined that the linear range for these PCRs was 23-27 cycles, and samples were analyzed after 25 cycles using methods described previously (Stavropoulos et al., (2001) supra).

TABLE 5

Primers used for strand specific RT-PCR

| | | |
|---|---|---|
| Position | Sense | Anti-sense |

| | | |
|---|---|---|
| 18S-RNA | 18S-FOR: | 18S-REV: |
| | TCAAGAACGAAAGTCGGAGGTT | GGACATCTAAGGGCATCACAG |
| | (SEQ ID NO: 70) | (SEQ ID NO: 71) |
| Rrm2 | RRM-2A: | RRM- 2C: |
| | AAGCGACTCACCCTGGCTGAC | GACTATGCCATCACTCGCTGC |
| | (SEQ ID NO: 72) | (SEQ ID NO: 73) |
| Rpo2 | RPO2B: | RPO2A: |
| | CTTCACCAGGAAGCCCACAT | GCCAAACATGTGCAGGAAA |
| | (SEQ ID NO: 74) | (SEQ ID NO: 75) |
| 1 | CC3-3C: | CC3-3D: |
| | GCTACCTGTGTGTCTGTATC | ACACACACAAGGGCAAGAAAG |
| | (SEQ ID NO: 76) | (SEQ ID NO: 77) |
| 2 | CC3-1C: | CC3-1B: |
| | AATGCCTGCGTAGTCCCGAA | CGGGAACGTGGCATGTATGT |
| | (SEQ ID NO: 78) | (SEQ ID NO: 79) |
| 3 | CC3-3R: | CC3-4F: |
| | GATCCCGCGCCTCAAGAG | TGGGACCGAGTGGAGCACG |
| | (SEQ ID NO: 80) | (SEQ ID NO: 81) |
| 4 | NGP-41: | NGP-42: |
| | ATGAGAGCATCAGATCTCCC | TCACATACCAGCAAAGCTTTG |
| | (SEQ ID NO: 82) | (SEQ ID NO: 83) |
| 5 | CC4-1A: | CC4-1B: |
| | ATCGCCATTCCAAGCATAAG | CCACAGTGTCCAATTTGTGC |
| | (SEQ ID NO: 84) | (SEQ ID NO: 85) |
| A* | Position-7.1 | Position-7.2 |
| | AGGTGGCAGTGCATACGCATACAT | GGAGAGCGCATGCTTGCAATTCTA |
| | (SEQ ID NO: 86) | (SEQ ID NO: 87) |
| B | DEC105: | DEC106: |
| | CAGTGGCAGGCAGAGCTTTG | GAGCAAACAATGGCACTAAGG |
| | (SEQ ID NO: 88) | (SEQ ID NO: 89) |

*from Shibata and Lee, 2003

### 5′RACE

[0250] RACE was performed using the GeneRacer kit (Invitrogen) and 5 μg of total RNA isolated from undifferentiated male ES cells using Trizol (Invitrogen) according to the manufacturer's instructions. Reverse transcription was performed using Thermoscript reverse transcriptase at 65° C. (Invitrogen) and the primer

| | |
|---|---|
| CC3-1DL: | |
| GATAGCTTACATACATGCCACGTTCCCGG | (SEQ ID NO: 68) |

RT products were amplified using CC3-1DL and the provided 5′ Generacer primer using touchdown PCR protocol recommended by the manufacturer, using a one minute extension time for all steps and 25 cycles with an annealing temperature of 65° C. and extension at 68° C. Nested PCR was performed on 1 μL of the primary PCR using primer:

| | |
|---|---|
| CC3-1DN: | |
| GGATGCCTGGGACTGGGAAACTTTACT | (SEQ ID NO: 69) |

and the provided 5′ nested primer for 25 cycles using the recommended cycling conditions. Nested PCR products were gel purified using Qiaquick columns (Qiagen), and cloned using the Topo-TA cloning system (Invitrogen). Cloning products were transformed into the provided chemically competent TOP10 cells and plated on LB-amp-IPTG-X-gal plates. White colonies were picked for further analysis.

### Transcription Inhibitor Experiments

[0251] α-amanitin (Sigma) or tagetin (Epicentre) were diluted in ES+LIF medium to a final concentration of 75 μg/mL or 45 μM, respectively. 85% confluent undifferentiated male ES cells were grown under media containing either of the above drugs for 4 or 8 hours. RNA was isolated from each well with Trizol (Invitrogen) and analyzed by RT-PCR.

### Example 5

### Detection of Small RNA Molecules at the X Inactivation Center

[0252] Given the results described above indicating that bidirectional transcription and dsRNA occur at Tsix and at Xite and that transcription through Tsix/Xite or the RNA products of Tsix/Xite, or both are required for pairing, it is possible that RNAi is occurring naturally to regulate XCI and differentiation.

[0253] Northern blot analyses were performed to determine if small RNAs were present within Xite. For these experiments, 20 μg of total cellular RNA is loaded onto each lane, electrophoresed into an agarose gel, and then hybridized to T3- or T7-generated riboprobes as shown in each diagram. As shown in FIG. 36 small RNAs of 25-30, 35-40, and 50+ nucleotides from both strands (sense and antisense) are detected. The let7b blot is a positive control that shows that the known miRNA (let7b) can be detected by our technique. Bands of interest are depicted by arrows. The same bands are detected regardless of the strand-specificity of the probe. That is, both sense and antisense-strand probes can pick up the small RNAs, suggesting that the small RNAs are double-stranded. Cell lines shown are those from Lee, Science (2005) supra, and Xu et al. Science (2006) supra, and Ogawa and Lee Mol. Cell. (2003) supra. Briefly, J1, wildtype male ES; 16.7, wildtype female ES; J1-ΔCpG is Tsix-deleted male ES; 16.7 Δ/Δ is Tsix−/− female ES; ΔL(Xite) is a 12.5 kb deletion of Xite; female-Tsix3.7 is transgenic female ES with 3.7 kb Tsix sequence deleted in the Tsix-allele; Female-Xite is transgenic female ES with 5.6 Xite transgene. Lanes 0, 4, 10 refer to days of cell differentiation for each cell line.

[0254] These methods can be used to identify small RNAs from any region of Xic, Xite, Tsix, Tsix/Xite, or Xist, ranging in size from at least 15 nucleotides, preferably, 17, 18, 19, 20, 21, 22, 23, 24, 25, 26, 27, 28, 29, 30, 31, 32, 33, 34, 35, nucleotides in length and even up to 50 or 100 nucleotides in length (inclusive of all integers in between) that are substantially identical to or complementary to Xic, Xite, Tsix, or Xist and that can be used to interfere with the normal counting and pairing process and to arrest ES cell differentiation.

### Other Embodiments

[0255] All publications, patent applications, and patents, mentioned in this specification, and including U.S. Provisional Application Ser. No. 60/697,301 filed on Jul. 7, 2005, are incorporated herein by reference.

[0256] While the invention has been described in connection with specific embodiments, it will be understood that it is capable of further modifications. Therefore, this application is intended to cover any variations, uses, or adaptations of the invention that follow, in general, the principles of the invention, including departures from the present disclosure that come within known or customary practice within the art.

The application's sequence listing, which the Patent Office published only in electronic form, follows.

SEQUENCE LISTING (91 sequences)

SEQ ID NO: 1 - DNA, 100000 bp, Mus musculus
ctaatgggacagaaggttttcagcctcttttgctttcagcttcttcgtttaggtaaaaggaacagagggacatattttatagaaaaggtggtgttaggggcgtaggtggcactgagatcattctggccacatcctgctgaattacaactcattattgggtggcagtctctgaatcagaggctggtatctgacttcacacatcagagggatagtgcttgtgtgttgcatggtggtttaggtaaatctggatagcacgtggagtagaaagggacctatggatataaaaatcaaaatggttattaacatggtaacagctcctataagcaagtcgattcaggatgagttctaaaaccatttgttccagaatttgataactacttccagtttttgttttgttttggtttttgttttgttttttttttttttttgttgttgttgttgtttgtttttttttttttggtttttttttttttggtttttcaagatagggtttctctgtatagccctggctgtcctggaactcactttgtagaccaggctggcctcgaactcagaaatccacctgcctctgcctcccgagtgctgggattaaaggcatgtgccaccatgcctggctccaggttttgaaatatggtcagctttgttgctgcaacctaacctagccagaatgacttacagaaaagctctgctgctttcccccaaagaggccaagtccccttttctctggccaagagatttaggcctcttctgttttggaggagtgactcctgccaagaaccctacctgataccagaccctttcttcgtttttacttttaaatacttattttatgcacatgagtgttttgcctgcatgcatgcataagtactgtgcatgagtgtctggtgcttgcacaggccagaagagtgagttgggtcccctagaacttactgcattggagttacaggcagttgttggtgctgggaaccaagattctctgggaaagcaacaagtgctcttaaccaactgcgcaggcccaatcctagattcttgttaaacactgagaaattgcatcaaggatttcctgtatggcttgcgataaggaatagtagtgtacaaagtacatagttcctgtgccaacatctgtcattaaccctaagattataaggaaagagtaggaaataatcacgtgtcttctattccacatgcaaccagtcaaagctctggttattgggagcaacatttatgttgggggctagggaataggtatagcagtggaaagtttcggtctagctgatgaggagacacaggtcaaggggaagaagccctgtttgaacagctggtgaggctaagggagagaaaacggagtaactgggagggtgccgattggggggggggggtttagatcattctaccaaactgaaagggtaagggtgccctcccatcaagtgttgaagtgtgatgctgtgaaagagacagggtaccacaaccttcaggatcaggtctgccacttggtggccttctccaggttagctggcctgcaagcttctgtctgattcttcctttttgttccgcccatctcactggagcaatactgggattatagatgtttcactgtgctccgggggacaaattcgggttgtctgagtagcactgcaagtgtttttactcagtggcccaactctctggtctggacctaggatcttgaactgggaggtctgagctgtctgcttttctgcaaactagcgtaggtgtactacaggaggagctggctggctggaggtcctacatcaaaacaaggtgagcgatgagacagactcctgaaagcacacacaccagggaaaattgtacaaactttaaatctttttctctcccttcccttcccttcccttcccttcccttcccttctcttttctttatagaaaatttattgcaactctccaaccgcacattactttttctcttcaacatcttgctccgcagcttccttcacgctttttgcttgggcattggcacaggccatgtgaagactggcaaaagccttagagttctcttctgtgtcgacgctggccttttcctttttgtacacattccgggtgggcatcacaggtcctgtcagttgggtggccaatttaagttcttcaacagaactgtctcccttcttcagagaaggcttcctgggggaaagtatgagctttgagcagtactcctttaggcgctgcatggtagcttgcagcgattcagtggatttgtttcgcctccttgggtccacagagatgccgatggtatgatttcttgtggttaccagtcaccctgagttcctccaggctgaagcccctgacagctcagaccttggtgtgtttttttttttgtttttgtttttgttttttcgagagagggtttctctgtgtagccctggctatcctggaactcactctgtagaccaggctggcctcgaactcagaaatccaccagcctctgcctcccaagtgctgggattaaaggcgtgcgccaccacggcccgacttggtgtggtatctaactgtagggcacttcacggtgggcctgaccggaccggatgcgggacgagtggcaatgcagcacgcttttgcctgccgagccctgagtctgcggatcttgcatggcagctggttgaaccaagtgtctactagctgctgccaatgtttgtggaagtggggcttcatgatcacgccattccggctggacgccatggctgcctcctgtacaggagaacgacagggcggagaggtcttccttctttctctatcctccctgacaaactttctctctctccctctccctccccccccccctctttggtttttcaagatagggtttctctgtgtagccctggctgtcctggaactcactttgtagaccaggctggccttgagctcagaaattcgcctgcttctgcctccctagtgctgggattaaaggcgtgcgccaccactgcctggcttgacaaactctcctgacacatggtatcatgtccttaagctggccttgaactcagtatgtagatgcttatgaccttgaacttctgatcctcatgcctctgtttcgtgctaggattacaggccagtgtccccaaacacgatttgagaatttattttcacagagatgcaatcatcatacaaccggtaaacggtgatctttcaacaaaagatggtgaaacaattgaccggatttcaaaacaaaacaaaacactcattcattatacaaatattcattctaatgaatactagatttaaaggtactaaagaaactttatatgacatctatggagaaaaaaaaaggaaaacttgtgcgttgtttggaaatggctttgaaggaacagtcctagttctagctggtaaatctggacttctccacatgcatcagcgaccaggagactattttacacacagagttaaatgcagaagtgactagacatttcaggaccagttttcctatggtcagaggaaagttaaaaaaacaaacaaacaaacaatactacctccattacagagtcctccgtgtattcatgtttattttcataaataacacagatagctacacactgagataattaaccaggcaccagcattactatatacatgtattttctaggttgctgcttagtccagaagcaatgaagcttcaccggttaaaggacactcaatactcacacaataccttctaaatctgtttttcaacaggaagtacccaggctcctcatagaaatggctagggatagacatagtgaaggcgaactacaaggtaagcatcactatcttagagtacacgaagcactggggaggtgatggcagcaagagccattctggactacataagaccctatcacacaggagaaaaaaagtagagattgtaaagggtaaattgataattaggggctggagagatggctcattgctgttccagaggacctgccttcattcccagcatccacatggcagctcacaatttcagttccagtggatctgaccacctcttcactaagacatcaagagaagtggctgggacatgtgttaacaagcacaagaatagtcgggcagtggtggagcaacgactttaatcccatcacttgggaggcagaagcagatggatttctgagttcaaggccatcgtggtctacagagtgagttccaggacagccaggactgcacagagaaaccctgtctcaaaacaccaaaccaaccaaccaaacaaacaaacaaacaaaagcaagcacaagaatcaaaagcataaaaaatgaggaaatttgttctcccttctgggattttcttcatttatgtgctcagggcacacagaaggttgaggagaacactgggaaatgacccacggaccacacattttaggcataaacagtgtggggagagttggaaaaaaaatccacacagaagcacacacacaaagaagccctacttagatcttcctctcctatacagaacaaaatccttattccatacaagaagggcaacaaatactacagcctctggccagttgtgaaagccatctgaccctggtgaatggacaggaaggggttaaataaaaacagttccggggaaaaggtagaaataaatactgtgtctaaatttgggaaagggagcagggggcaggagtagggagcaggaatccaccacacaatccaagactgagatataataaaccagcagatgaggcacactccctgccagtcacaaggctaaggagcactacagtacagcactacaacataaggcttactacagaagtaaagacagttacgtggaacaagagctctgagacacagcgcaaaaaccacctgagagtaatggagttatttaggaaaccagaggcaatggctccctgtcaaacaccctacaaagatgtatcactctgagaaaagcaagccgcagcttcatctccagagcagtggggcagaggcttaggccaggatgaaggaagacagagcccagaaagacatcctcaagaaaactgattaggaacacaatgggggaaggcaaaagcctaagagtggaaagcaacaaacaggaaattctaactggctgaaggtactaaactagtctaactcatcacttagtctgccttatgtgaaagctcactagtaggaagtgacagattgaataagagaaaaagcttgcaaattaaaggtagctatccacgagtctcatttaatttagaagcttacatgtaaccctattttccactggggagcaggaaagtggaggatgtttacactttaagtgggagtagtaaagtcgtttttatgagaattcaataaacttaagagaaacatagaatgggctaggactttctgttgagcctataaaccagtgagtggtactcgaactaccatagatgacaacccctttggcaaacctctatctccgaaaatatttacattgtgattcataatagtagcaaaactacagctatgaagtggcaatggaaataattttatggttgagaatcaccgcaacatgaggaactgcattaaagggccacgagcagcattaggaaggctgagaaccactgctctagacagacatctgcttgtgtactatttttatggaatttttatttttttctagacagggtttctctgtgtagccctggctgtcctggaactcactctgtagaccaaactggcctcgaactcagagatctgcctgcctctgcctcccaagtgctgggattaaaggcatgtgccaccactgcccggcttttatggactattaaatgaaacctaaggctaaggcagtgatgtagggagggcaaaggtgtatctaggaatatatagtttccaatttccccttgtggcacaaatcagtttaatgaaaacctaaggaaaagccagggatggcggtgcatgcactctgagttcagggacagcctggtctacagagtgagatccaggacagccagggctacactatctctaaggggaaaagaaaagaaaagaaaagaaaagaaaagaaaagaaaagaagggaaggggaaggggaaagggaaagggaaaggaaaagaagggaagggaagggaagagaagagaagagaagagaagagaagagaagagaagagaagagaagagaagagaagagaactcaagaaagagaatagaggtgattattatattcctcagcaggtctgagctgtataagcagaccaaagtatactttcctagtatcttctactctcatttgataaagcaagcataataaagcactgtgtttgggagtggccattcttggactccttcataggcttcaaacactacctttacaaaaggatacaaatttatttgagtgacattttagaacaacattaccaagagccatgggagagatgggggagatagttcaatgggcaaagtgcttgcatgaagacttgagttcagatcccaagcacatctttagaagctgagcatgacggcacagtgcagcactcatggatagaaacagatggctcccacaggcttgctggccagctccaggttcagtaagaaaccctgtgtatcagtcacttttctgatattgtgataaaacgtggccaaggcaacttagataaaaaaagagtttatttgggcttacagttccatgacagagtggaggtggcaggcagcaggcatggtagctggagcagccaagttgaacatcttgaactgcaagcataaggcagagacagtgaagtcaaaatggtgcaaatttttaaactctcaaagcctgcctccagtgacataattccatcaacaagactgtgcctccctagcctttccaaacaatggcagcaactagggaccaagtatcccaatgcctgagactatggtggatatctcgttcaaactaccacaccctatctcaaaaacataaggtaggttgactcagatcttccagaggatgtaggttcattcacagcacctataagacacctataaacaggtgttttacaactgtcaacagctccatcccaggggatccaggtccctcttcctgcctcccctgaacacctagcacacaagtggtatgcagacatatgtcagcactctggacgtagaggcaggtagatttctgtgagttctggggccagcatggtctacagagtaagtttcaggacagccaaggctacacagagagaccctgtctcaaagaaaacaattaaaactaaaaaacaaagtgaagcacaatagaggaagacacccaaagtcaacctctaatcacatgacgtgtgtacgtgtgtgcatccgtgtgcgagaaaacagacacacacagacacacacacacacaatgcctgggacaaaaacaatagattagcacataattaatacaaagtgatagttcaatatgataacaagaaccagagattaaattcaatgctgttctcccctaagaatgacaccgaggatgtagtataaataataagcactttagttgaagtcctgtcaaatcgtgaattgaaaaaaggagaccataccaatcaactctaaaacataggaagacacactactcaaagtcgctctgatgaacagagtatagttcatcaagcctatatccctgcattctggaaactaagaaagaagattgcagggggcagaggcaggcagatttctgagtttgaggccagcctggtctgcagagtgagttccaggacagccggggctacacagagaaaccctctctttaaaaaaccgggaaaaaaaaagattgctgggagtttagggcaggcctaggctaccagtgatttctaggctagcctgtactgcagagtaagactttgtctcagaaacaccctccaataaaagaaatcactgcaacatattaattacataaaatattcaagtttcaataaagacggaaagatatacaaggaagtgggagggtaggatctgtataaggaacagaaactttagtgatagaaaatgacttaaaaaacacagttcacacctgacacctgggactgctaatgacaacaggagctagaaagtgctcaaaccatttagggtatgaaccttgaaagaaatagctctgagttctatccttggccagaaactgggacatgcccttgctcctgtcttgtcaggagaccagaaatgcaaaaacaaccactatcataagagaaagagaaaataatttatgaatatcaacagttaaagaagagcccccagagcaccccacattaagtctggcaatggtgatactaacgtttgctaaatgaagacaaaaggaagtaatttcttgggaaacagaagttgtcatcgttgggttataagacaaagataaggagaagcacattgatctactgtagaaaccaaatccaggacaataaaggcctccatgatgtgtgacacatcatcaggcttcgtctccagtcaacaccagctcaggcaggcctcccgctcttgtttgtaggagaaagaggaggctaagtcgggaggagcacggcaagtttggggctcactcaacacggtgcatgccacatagcctacagggtaaaactgtgtctttaaaacagaaacaagcaagcaaagaaacaacaaaatcctcagctttcctaaaacaactgaaaagcaaaagccacttcccaactatcggtccagattaccctgataatcaaaaccaaagagaaagcaaacaagtaaacgaaaatcaaaaatacaaatcagtattgcttgggtacaaagactataacaaaatattacatttaattaaataccacctgaaaggaattcgagtttgggagatatgtcagtgtgaaatgttttctgtgtacatatgagggcttagttaggatcccagccaccgtttttttttttcttttttctttttgtaggcagtatgacagcatctgtcaattcagcgctgggaggtagagatggcaagatcatagggcttataggaagagaacatactacaggcaaatgtagtttattgccagaccccaggggaggttaaacgttttaaaagtcaatccataatgagctaggcacggtggaccatacctgaaatcctagcccctgggaagcagggcagaaggattgggacttcaagggtaagctagactacaagcaagactttatcttaaatttgaattagttaagtaactaattcattaactaattaatgattttaacaacctgggctgagagcataggtcagtgggagagtgcttgcatagcacattccagttttaaccccaccatcgctgaagtgactgtggtaacgccatcttgtcctgattttaccctgactccactttgttcaggtacctttttcagcccctaatcccctaaaaagtccaacccaccttgacagcatatttggaactttctaaggccctgaccacagcacaggtgaataatcaacctaacagctgaatgtataatcaagagaaacgttaccaggtttccccggacccatgcctgccaatgacatcattgcagtttttgcctttacaaatgcagtacctttgagcttcagtgctcttcagagcaggagtctgcactctgttccaagctaataaaggactctaatttggtcttacattcatagtactttgaaactttcttgcttgggctataactgcaaaataaattttccataccaacagttgaaagaagaaacacaatcataccaacagatacatttttaaaaatccaatatttatttattatctatgtgtatgcattattttgtgtgtatatgtgttcataagtatgtacatgtgtgtgtgtgtgtgtgtgtgtggagttcagagagtgatgttgtgtcatttccaatcactctcaatgttagtttttgggacaaggtctcaaagaacttagagtccattatttggctaggctggctggccagcgagctacagtaatccacttgtgcctgataccctcactcaactggagtcacaattgcctgtcaccatgcccagtgttgatgtactcaagtgttcctgatcctgctccaagcacattacaacagagccatttccccagcgccctcccaatcaatgttcttccatgataaaaactgtcagtggacaaggctagagagatggttcagtgatcagtatcgattcctggtcttgcagaggactgggtttcagctcccagcagtcatatccagtagctataactgatgctgaaggtcctctgctacacattcatcatcttgctactgaggtactataggcgcgatgctttttctgtggttatataaatgaaactttataaaatttaatttataaaaaaaattcaaaattcaatttctagtggtttgttgctaatatattagctcactaattttgacttgagaaagaatcttatctaacccagactggcaccaaactcacaagttagctgaatctagtcttgaactccttcatgatcctcctgcttctatctctgaagtattattaactccaattacaggggctctgataccctctgctctctataggctcctccatgcatgtaatgtatataaactcatgcaaacacacggaaatgtaactaaatacatcttttttaaaaattctcagctaggggctgagaaatggctcagtggttaagggcactggttgctcttccagaggatccaggttcaattcccagaaaccacatggtcgtttacaactgtctgtaactccagttccatgggatctgacaccctcacacagacatccatgcaggcaaaacaccaatgtatataaaataaaaataaattatatatatatatatattctcagctaataggaatagaaagaaatgctaccacaacaaagcatatgcacatacaaatcatagaaatgcttaaagtctgaaacttttctcttaagattatagtaaaacaagcccggcagtggtggcgcaagcctttaacccagcactcgggaggcagaggcaggcggatttctgagttcaaggccagcctggttgacagagtgagttccaggacagccagggatacacagagaaaccctgtcttgaattttaaaaaatcaaatcaagattataataaaacaaagaagacctttactgccagtctaaagcagtggtggttgctgttcatgtagtaatgttttaaagattgggggggggggggaaggggagacaggaaaaatattcagaagaatgatcaaaactgaagccacaaacactaagtagactatcccaaggaaacttaggtgccatggctaatctctacaaggactccctgcctcaaaagaaaataaaaactgtaagggcttagaatgtagctcagtgggagagtactgcctaccatgttccattgtgagttccatccctaatactggggagggggtgtttagaaaaaaagaaaaccaaaagaatatacaaaaggataacatatcaacagtagattgtttcaccaaactggtactatccaaggccagtaataaaaatcagtgtggaaaccgggcagtgtggaaaccaggcgcacgcctgcaatcccagcacttgggaggcagaggcaggtggatttctgagttcgaggccagcctggtctacagagtgagttccaggacaaccagggttacacagaaaaaccttgtctcaaaaaaaccaaaaccaaaaccaaaaaccaaccaaccaaacaaacaaacaaacaaaatcactgtgaaagctgtgtggagcacatctgtaatcctagcacttgggaaatgaagactggagggaggatcaggagttcaaggaaaggctcagctacctggggagtttggggccagcctgagttacagaagatcctatctcaaaataagacaaaaatcaatgtgctaatatgctaaaaataaaccagtataaactggaaatttgtaaagtcttgcttatataacagtaggggggaaagtcactattaaagttctacaacagcaaagtgataaatgtataacaaactactatatgcggaaaactaaaacaaagcaaagcaaagctaaaggggccttaatggaatgtgatgcccccagactgacctacagatgaaaagcaatccaaaactcctagcaaaaaatttatggacactaacttactgtgtcaaaaatttatagatgatttctgctttacagtacagaatgctcagagcttgaaaactcattctagcctggcatgctggtacatacctttagccccagcactcgggaggcagaggcagaggcacaggcaggcagaaacactgtgagtctgaggccagcctggtctacatagtaagttccagaacagccaaggctatgtagtgagaccttgtctcaaagaaataaacaaataatgataaagcaagcaaacaaagagcctgggcacagggagagcgatgccatggagagtccaaaaattcttcataatctctcacgatgaacatcggagaaaaatcccatatgcttaggagggtgcaaccaccttcaaatatattcagccatttcaaaatacataagagtgttctgtactgaacaaggctcctgcttaaaaaaataaactgctttgtcaaggactaaaggagatgggaaaggggacagacatatctgggtacccaattccagcctgaagtttccaacccacagctctctcgtcatcacatctcacttacatggagggggagagataattaggagggtgggcaattgtacttcacaacccaggagcacacaagcagtaaaagacagaataaccagggacattcagaacatgtcaaatcaccacgtatcttactaccacagccctacaggcctatgtactgtagttccttttactggctacatcatacttgactttcaaaaaaacctgagaaatgagggggggagacagacagagagagagagagagagagagagagagagagagagagagaatacaaagcacatgccctttaactgtcaaattgacacagtctacagtcatctgagagactgatcaaatcacactggcctgatgggtgccatcattccctgggtgagtggttccgggatgtataagcaagctagtacgcacaggtgagccagcaagccgtattcctccatggtttcttcttcaagtccctgcttgagtttctgctctgacttccttcagtggtggattaatgatctggaagtacaagccaaataaatcctttcttcctctactttgcctttggtcagtgtgttatatgacaatagaaagaaaagtaaaacaaaacaataaagacaacacagtttaaaattaaaaaatccagcatgtattagtatcagacttaaatacgtactgaatgttggaattattaaactgaaatatttgcctgtttttcagtgtcagttcaatggctgaaagtcaattaatagccataagtttgatggatcaagtctgaagcagaaagattgggaattccaggccagcctaatccacatagcaagaccctgtctcaaaaacacaagaaagaaattgatatgaacacagtctcagagcccttggtgttacccgaagggtggagcagcaggatatttttctcctgagccttacaaaggtcatattgggggagtcacatgtccagtcacatactggagcctaacctgctgggtttcttgccttcaaatctccatagaacttaagtgatggtattgttacatctcagaaaggtcagattcatcactgatgtcctgataaccctctcgttgggaccacacatatggtcttttctcataattggctgactgactttcagtagctgaatcaaagtcctgaaccactgctgtgcagaaagatccatcggcacagtaacgttttttacacaagtggaaataacattctaaatttgagtctcgggcgctatattgtttactcttcaaaagtaccatcagtgtcccaaagaatatagcattcccaagattcaaatatgtgacttcctttgcctgcatgcagaaccatttaaagtgacttatagtgtagccgcccgcgtaatgccctgttcaaagcttcctttgtttatgcagtggcaacagttgccctgtatctataattaataaagattaattgctaatatggactattctggtcttagtaagatcctatgcaaatagaaattattacttttagttttgtttttatttattaaaattttaaatgagatttatttcattttgtgtttgtgcatcacgtgtctggtacccaaggaggtcagaagaggatttggaccacctgggacttgagttacaaaatattgagaactcccatgcaagataccagccatgttagatcctcatgtcacaaaaaaattaagtggagaagctgagcttataatcctagctatttgggaggcagaggcagaaaaatcaagaccagcctgggttattacacataaagtaagagagacaagctgggcatggtggtacaagcttgtaatcccaaagcttggcagctagaaatgggtagtgagggtcgtggacagcctcaactacagaagacttcattaaggggctcaaaaagtgggcttacgaccgcctgtaactcgagttccacaggattctatggcttcttctggcttccataactgtactcatgtgcacattcctacacacacaattagaagcaaatcttaaagtgggaacagatctagatatagttcagtggtagtgtgactgtctagcaccacagtgtcctaggttccacaaccaatactggggggaaagggggaaataagcacaattactaaactaaaaatgatgcttaatctacgggatgacaaaagagtgagccgcaactgtggagaaatatggcaaaacgtcaactctaatattagggtttcattttattctctgtgtttgcatttgtgttaaataggtcataatatataaagctgccgaaatgttttaaaaatagcaaacattcctttgtcaccctcatacatatatgaaaaaaatgagatcatattatcctacaacttgtttttaatgtaacaagctatcatatcatcttttacaccaaagagccaaaatatacagacttttaaaacatcctcctattaatggatacacaggttgtttcttatcacttgccacaagaaaagagctgcatagacatcctcttttaggtatccttatttatatactgatgcttctctttctgaaggattgagccgtgaaagtcagactactgagttccagatattggaacttggtactccatatatatttttatttttctaaatatagctacatcaatgcttccaaatggttgcaacaattcatactttattcagcaatgcctagctaaggtactgaaatgtctttttgaccaagtaagcatctaacaaaagaacacagatcaccctataaggccctattataacagatgctcccagaccacaaatttagtaacatactctggtcctcatttggagtacataaaaagggcatagggcaaaaagcgttattataccataattaatgttaccaataagctagttttatcaactactaagtgttgatgagaaagaactgaggccgtttttcgaggcctctggggagctagaataaacactccattttggagacactcactatccgtcaaaccccaattagacaaaggaaaacaaaaggaaacctcaaaacacgatctctcctaggaatgagcctccccagcctgacaggttcatccgtggaggtccggtgatgtgggcactgatcactcatctattgtgggcggaataggggagaaatccggagtgccagccgccgactactcgtcccgctcggcagaccatgcggtcggagtggtgaccgctgcggcgggtcggcgtggtgaccgctacggcggccatctctctgacagcgcgagacccggcactcaccagggcatgttcattaattggccagtttctccactctccttattaagtcatcctctagctgcctggctaatcccgggaaggacgtatacatgtggacgccgccattttataagttacagaagcctggtggtgccgtgggggggggggggggggggtcgggcgggcggagagcatgcgtcacagccgaacagtccctgtgccgcgcggcgccgcgctgtcaggctgtccctaaatggctgctccagcaacgtgaccgggactgtccgcggtcgcttccgcagatgactgagcgcttgcggttcctctcccggctgcctctgttagcatctttcacgtgctcccgcgtttcttgcccgtctttaatttgttctcttgccaccccctcaccccccaccccccaccctacccccaccgaaattcctttttcttttttgtttctatagaagaccagcttgtgttttgctcccgagatctctttcggagccccttctgtgtttttagctgccagcattgctgtagctgctataactgcaatctacatgtcacagaggctaggtggcaaagtaaaccacaggcctgggtatgtcccctagtttttgataaagacagaattataccttgtcctattcctattggacacctcacagggccgaagctgacaataactcctttggcttttggatgttcacaccaatactggttaccacacaaattagaaaaggatcttgggttatcaataaaggcagagaactacacttccatttaaaaaagaaagaaaaaagttctcattttacctattgcaccacgaggcacaggggcagaagcgagtgctcagtggttaacagtgcttaatgctctagcaaaggatgcaggttcagtccccggcacatacttctctctacacagatctctctacacaggcaaacatgtatacacacacacacacacacacacacacacacacacacacacgaagtaaatgcatgtgtgtgtgtgtatttaagtaaaaccatgttggaaagttgccgaaggggcctcagtgaatatctgcttgaggaaggctttgctaaggcaacctgggacagctgtcatggagccgagggctgtcctctctccagaaggtagcacattttcccttacactggtttccctctttcccaagacagcaaagccctggcttcttttcattccattacaggcagttctttcctgtgcgagctctcctcagctgtagccagaatttgcctgtttggaatcctttcttcctcctagagtttctctgagatggcaagtttgtgaaaattattacacacacacacacacacacacacacacacccatggccaagacaatcaatttgatatgctcctgtgactataaccactttattgcccccccccatttaaatttttaatctagattcccttccccctctctccatgtgctcatggccagcctctagttctctactctctctttctctctctctgcctttccctgcctctgctaccctcttaactcccctccccatgccctgaataaactctattctatactaaaaaataaaattaatctaaatataattacatattctcccccattcccttctccaattcctcctatgttattcctcgccactacacacacacacacacacacacacacacacacacattgcctctcaaatttctggctttttgtatatatgtgatttttctctgggtgcgtatttggtttctacttatctttgttgttgaacaccccaaaagcagggctggagagttggcttggtgtgtaagagtacttaatattctcacaaaggactggggttcaatgcctagcagctgcatgaggcttctcacctcctctgacaccatgctcgagtgtggtacacagacctatatgcaggcaaaacactcacacacataaaaattctaaaaaaaaaaaagtttttataaacttaaaaaaaacaaaagtcaaatataaaagttgattcagggtatctgggagcccaactgtctgcatttccaacttcattctaatgtctgtggcaaaactgttgaaagaagtacctaggaaagtgtgactctagctaatttttaaagatttggcttttcaggcatgcatatcgttgttgctcttctgtttttgagacagggcccccgttattccaggctggcctcgacttattacgtagcagagaatgactgtaaattcccaattctccttccttccccgggcctcactttatcttctacaaacttcttgtgacatactcaggcctttggcaatagactaaaactttctggttttttccctcatcacccctttttgtccatatgggaacaatcttttagttttaggataaaaaccttatactctattctcatctaaaagtatttccttaatttcctttaattttctttatataaatgacctataacttcttacaatattttacatttatttatttttgtgtttgagaaagaccaaggcggggtagaagaagggagagagagagagagagagagagagagagagagagagagagagagagagagagagaatatatggatgtgtccaccacatagtttccaaggatggagctcagggtgtctgccaggctttgaggtaagctccttatcagctgagccatcttgcagtcaagactcagcccgtgtgtgtgtgtgtgtgtgtgtgtgtgtgtgtgtgtgtgtgtgtgttactaaggactgaatccatgattttctaattacatgctaagccattgctctaccactgagccatattgccagccccaagaaaaatgtttttctttctttctttattggtatctcaagatagagtttctctgtgtagccctggctgtcctgaagcttgctctgtagaccagactgggaatcagaaatcctcctgactctgcctactgaatggtgggattaaataaaactattctttaatattctaaatgaaaatcaaagaaaagctgagcaaagtggtgcttgcctaaaattccagaatttgagagagttaggaaggagcatcaggagttcagctcatcttcagcaacacagtaagttccagatcagcctgaattacatgagaccacgtgaaagaggggtggagagcaaagccaaagcaaaccatgaggctgtatatgaaacataggaaacaacatgctatcagtctttgaaacagtcctgtgttttcttacaatttaagttgcactgttgttagaaatttatgtcctgttagaacaggttttcagaaagtgcttttgctaaaggtattgatggcctacttggcttcacaaggtaaccaaccacaggattaaagacttgagtctctgccttcattttgagtctgtctttccgttcatttcaaactcctgcttgactgtgcataggcatattaataacagaaggagtgtcttcctaaattatttcattcatccttagtcatgttgaactccaagagcaaaacctcccaggacagaccttcttccatatgagggcagttatccatgatgcaaggcaaaagtaatcagcttatgcttcaaacatgagccaccctttaaaaaaacaagaactctctcaagacatagtatggtctcaagctcaaagcaattcttctgctgggattataggcatgtgctaccatggccagtcaagatgagggtttctctgggctatcttgcagtaccacaagacacaataattagtcaggctacacctcgaagaaaattacttttttttcataatgagctacaatttatttatttattgaatttggagtattcctcgatatcatccttggcctaagattctttgccatagtccttaaccactacgcaacagcaaccgaccaccttccgtggtttcccctctcgatcgattctacagaggcctacccattcccctagtttcttgttgtcatcaacctttatcaggttgatttggtgctcagcacaaagtgcctccaccagcttgacatacatgggctcatcacagttggatgcgagcacacagagatgggcttggcgcttgtctaactaaggctttggcagcttcgagtatgccacgtgctaggccatcctggatgagggcggtcttgagcacctcttgtagagcagtgttgacgtccattacacctccagcagctatgccttcctcggccatggcggtggattatgggtgacgccgaatcttgaacgcacctgagcttctgcctccgcgcaaattggtggcggcaggggaaaaaagcgaaaattacttattatgggtactccttgttctctattgaaatgtctctcctatttttagtttaaatctcaatactccagcgataggggcagggtcgttgaacccttctatggctcttaccacttgaccacctttgtcatcaggttatgctactctaagttactccatgttatataaaacattattagctcgtgaggtcaaactgccagtggcctattctttaaagaaaactgaacctggatcgtctggaaaagcagcgaatcctcttaactgttgagccatctctccagccccccaaatgtattattatctactctttctgtttgtttgtgtttgttttcaaggcagggtttctctgtggccttggctatactggaactgcctcggtagactatgctggtctcaaactcagagatccatctgcctctaactcccaagtgctgggattaaaggtgtgcacctccactgctcacattccatgggtttatcttaatcacatctcttttattcatattgcaacctcaccagtaccctcagtaacgtcatttaaataaaacaaacaaacaaacctgggactagagacatacctcgatgcttacaaacatttgctactctttcagaaaatccaagtttgattctcagcactatcaggcagttgacaaccacctataacttccgctccaggggctttgctgctctcttctggtctttgagggcacacacagaccatatacataactaaagtcagaaataaaccttaaaaactcaatacttttcaatgatgtaatggggatctaaagagatggctcagaggttaagtatttgccataaaagcatgaggaccagagttcaagtccccaaggcgtgaacccatgtgaagccctcctataattgcagctatgaaaggctcaaacagggatccccagagcaagttgcctaacaagacgtgccatatcagtgagctctcggtttggctaagatcttgcctcagtaaacaaggtagaaaaatgattgaagacattaaacttaggcctatatattcacacacatatacatatgaacctatatacatgtgtatccacatctatggacaaaatgcatatacacacaaaaatggaaaaggcaagggtagagtgggaagatgaacaaatgttttctttgctctctcaaccttggttataaaatacttcctttaaataacagaaacttaaaaaaaaacaaatcaggtatatagctactactgctggacttcagtccatgcccctcccaatacccactcatatctttccttcatcttattcaataagcattcttaagttttctgtaatataaatcaagaatcacaacaatatataactagagagaactctgcggttctgaggattcctcaggttgcataattgtgaccatcaacttgcattgcctgctcctgtgccaagactataacaccggagtatgtaatccggagtatgagctgagaggggaaaaactgatgtggcaagtggaagaacagatatagaatctatgtatttatttacttatttatatataataaaacacttatacttatcacttatatctgtgaccggtagcacatgcttgtaagcacaacactttgtaggcaggaagttcaccataagttcaaggctagtttggtctacatagtgaattccaggtcagcttaaacagtccttggaataaaagaagccacagagatggcttagcagctaagaacacttgctgctacagcagaggcccacattaagttcacactcctctgagacccatccaccatggctctgcttcccaagtgctcgtattaatggaatggatcattacatcttctccaaaacattattatttgtatttacatttgattattacatgccaggagggttttgttttttgttttgtttggtttttttttttttttttttttttttttttttttttttggttataattggtactctataagcttcttgtatgtttataggcttctctttctttattcttttcttttttatgaatgaggcaatttattaacccagtattattttttctaatgcttcttgttggcagctgccacctgttcagcgatcctgtccagatgtgtttcctgtccctgaggtgttagcttgcggcccccatctcggcccttttccaccattttcagccctttcagggcttggaggacctggcaagccatactctcagagcctctgctgaagtggctgggcctaacaccgttcctctgccatccttcatagatcttggtcacggaaccaactcctgcactacagttgtgtacagaggtacaggtccggagttgtggaagcagctcgtgggtagaaccagttctcatcatatggggcaagctctttatgtttggctaacttgactgtgtccacccattcccgaactttcagcttcctggactttttgaggaaggctgccagcgctctgacgaacctgatggttaacatcttttacagtgacttcaggcatcgttcagcctccatgctgccagccaggggaaagggtggcatctctttaggttgggaaaattttcttctgattttgttgatatttttccgggacttggagctggggactcttcactttctattactataacttataagttggtatgcctgttttatgaggtgctggagattgttttttgttatcttatataaagtctgtgaagttgcacatgaaagcctgatctttagatcccttagcactgaaattacaggcagtaaagatttgtctagtgtgagtgtaaatcttgaactttggtcatctggaatattaagcatctcaagagtaatctaagagcagtcttaagcaccataattgatcacttcttaggtctggggactaaagacatgcaccacgtccacctggttgaccacactttaagagatagcattgtaaaggggctttctaatattttctagggttaaagtctattgtcttcatggtagggagcatgtcagcattcaagaagacatagtactggagtttgacatctggttccacaggtagtaggaagaaagccaaccaccggccctggcttgggcttctgaaacctcaaagcccactccctagtgacttatgtccttcctaattcttctaaagtagtgccacctcctccccgctcctgatggcttagtgataaaatgtctgaggctgtaggagtcattgttcttacatgatctttggtagattgatttctgtatagggtgagatagtaccactatgctaaggatcacttggccaagtgactgtatgtctcttacatgtggtgtttgtacctttgttgagtagtggatggctgtctccaggtcctctattctatcccactaatttacaagcctacctatgagcagtagcatgttgacgctgtggtgcaacctgttcattcatttgaagctttgtcatgtagctcaatctggtctccaattctctatgtggctatttctgatcatccttgtaactcccaagggctgggattcacaggcataagctacttaccatgtcacctatttttaaaaactatttatgtgaatgtcattagaattttgctgagtatagcgctaaatccatagatgggtttttgatgcaacttagacaatattatgttgattcatgaacttgggagtgtttcttcaaccattttataccagatcaacccctctcccaatatacgttagaattgaaaaaaatatagatttcctggagagactggatgcctgatctacctatagttgtggctccaactttctctctgttcacagagccagtagtgtcattgaacatcccttcctttaaaaaaacaaaccatttttcatgatttattttgatcatttttccttcctccaactcttccccactcatccaaatccatattcattttcttaaaaacaaaacgaaaactgcgctgttttgtctggatggtgttttcttggagtcatttactgcagtctttctgactccttatcttcatagatgcctgagcattgaaagaaagggcttgatgaagacatctcatctaggaccaagtgttctaaagtctcttactctctgcacattggaagaccatttcttaactcccatttctgtttcttgctgctttgtagtgggtccttgtttcttgacccattatcatcatcatcttgttcttccttcttctcctctttgaatttgcatggagaattcctcaagattactattttaccccaggtgcatttttaatcttaatgttaagaatatgcaatgaggcaggcagtggtggcacacacctttaatcccagcacttgggaggtggaggcaggtggatttctaacttcgaggccagcctggtctacagagtgagttccaggacatctggggctatacagagaaaacctgccttgaaaaacaaaacaaacaaacaaacaaagaatatgcaataaattacctagttaagtgtacaggaatggaggtgttttttagaaaaatatttatttaatgtgagtacactgtcggtcactgttcagatacatcagaagaggttagatatcggatcccactacagatgactgtgagccactacgaagttgttgagaattgaactcaggccctctggaagagcagtcagcactcctaaccactgagctatctctccagcccaggaactgagttttagcacatatcccttcatgctttcttgtgataagactaaaaagtgtccccgaaacctgacataccttgatgtacacggtgtgagaaagaatgatgaggtttgcaagaattgggactaagtaaaacacagagactaaatttaactctttaatttgatgattctctctagcatccccacaaaaatgatacactggcttgcataatctgtgaccagtacctcgcaagttctaaattctctttgtacagctcatttagaagttctcgtttatacaaagccatatccatcgtggagccaggtgctcttagctgtgaagagcccttccttgggtcttttttccctaatatgtcctatgtgacttctcactggtgatgcttttggtgtgcttgttactctgatcctgatcgctctgtcaactaaagttagacaaagtaacctttacttctcaattcagataggaatccttttgcactccaagtttggcttcagatgccttggaaagattcatgctgccacctgctggtttattcagtctgtgtgcatcatttatttacttgttaatttgtttttcttttgttgaaacagtttattttgtagcagatatttttccatccctacctgaaccacctcaatagtaagattagtgaattgctggcactttgatcgtccataagcaaaccaattttgtgtcctttattattcatgggacgcctaaagggaacttagaacagactgtgaattatttgtcagcgtgaatcaacgagacaacaatatcctttgattttctaatacccagggtgtctgatctctttcatgtggatattcatagtttgacagttaacaaaatttgacagttcttttaagttagcagtgtctctggggcgagtaagataccaatgagctattattccctcaggctttgctttggcatttaggaattatttttcattactgctagcgagtaacgtacttcagtgcgtttttgtcccaaggtatggagtcaccaggttcccagagaaagactaagatgccaatgacccaaaactatgagcgtaagcccaccaaatcggtcacaactaatactctgataatttaggaaccaaggagccattttgtgaggcatttctaccctttcctctcctcatctgaggtcgccaactaatgcagaagaacttctagtgtccaagacgcggagcgatacatggtttgtccaagtagaagatatattgaaattttgcatagacaggtgtgtgacctaatgtacattatttaatgtttatgtggaagttctacataaacgtttttagctgtaaaataggataatccttcattatcgcgcaaaataatgaaattcacgcgtcatgtcactgagcttacgtacctccatctttattcattttaatttttttataatatagttagacctaaaggtccaataagatgtcagaattgcaatctttgtggccactcctcttctggtctctccgccttcagcgccgcggatcagttaaaggcgtgcaacggcttgctccagccatgtttgctcgtttcccgtggatgtgcggttcttccgtggtttctctccatctaaggagctttgggggaacatttttagttcccctaccaccaagccttatggcttatttaagaaaacatatcaaaattccacgagatttttgacgttttgatatgttctggtaagattttttttttgacatgtcctccatactttttgatatttgtaatattttcagtcaatttttcatttttaaggaatatttctttgttgtgccttttggttgatacttgtgtgtgtatggtggacttacctttctttcattgtttatatattcttgcccatcggggccacggatacctgtgtgtcctccccgccattccatgcccaacggggttttggatacttacctgccttttcattctttttttttcttattatttttttttctaaacttgcccatctgggctgtggatacctgcttttattctttttttcttctccttagcccatcggggccatggatacctgctttttgtaaaaaaaaaaaaaaaaaaaaaaaaacctttctcggtccatcgggacctcggatacctgcgtttagtctttttttcccatgcccaacggggcctcggatacctgctgttattatttttttttctttttcttttgcccatcggggctgtggatacctgctttaaattttttttttcacggcccaacggggcgcttggtggatggaaatatggttttgtgagttattgcactacctggaatatctatgcctcttatttgcgtgtactgttgctgctgatcgtttggtgctgtgtgagtgaacctatggcttagaaaaacgactttgctcttaaactgagtgggtgttcagggcgtggagagcccgcgtccgccattatggcttctgcgtgatacggctattctcgagccagttacgccaagaattaggacaccgaggagcacagcggactggataaaagcaaccaattgcgctgcgctagctaaaggctttctttatatgtgcggggttgcgggattcgccttgatttgtggtagcatttgcggggttgtgctagccggaagtagaaagccaaggagtgctcgtattagtgtgcggtgttgcgcggaagccgcagaggactaggggatagggctcagcgtgggtgtggggattgggcagggtgtgtgtgcatatggacccctggcgcggtcccccgtggctttaagggctgctcagaagtctataaaatggcggctcgggggctccacccgaggctcgacagcccaatctttgttctggtgtgtagcaatggattataggacatttaggtcgtacaggaaaagatggcggctcaagttcttggtgcggtataacgcaaagggctttgtgtgtcacatgtcagcttcatgtctgagttagcctggagaggtggcacatgctcttgaatgtgtctaagatggcggaagtcatgtgacctgccctctagtggtttctttcagtgattttttttttggcgggctttagctacttggcgggctttgcccgagggtacacttggtgcattatggtagggtgtggttggtcctaccttgtgccactcgaagctgaggcaaggctaagtggaagtgttggttgccacttgacgtaactcgtcagaaatgggcacaagtgtgaaagtgttggtgtttgcttgacttccagttagaaatgtgcattattgcttggtggccaggatggaattagactgtgatgagtcactgtcccataaggacgtgagtttcgcttggtacttcacgtgtgtctttagtcatcattttttcgaagtgcctgcccaggtcgggagagcgcatgcttgcaattctaacactgaagtgttggatgatgtcggatccgattcgagagaccgaggctgcgggttcttggtcgatgtaaatcattgaaacctcacctattaaaagaaagaaaagtatctaaggccatttcaaggacatttgactcatccgcttgcgttcatagtctcttacagtgctctatacgtggcggtgcaaactaaaactcagcccgttccattcctttgtattgttcagtggctagtctacttacaccttggcctctgatttagccagcactgatctcaagcggttctctaagcctactgggtataagtggtgactttggccagagtcatagtggatcacaaatcactggtgaagaggtagaatcctaccttcttccaaaatctaccccatgactattgctggggttgcattttgatttcaatgaatattttggatgccaacgacacgtctgatagtgtgctttgctagtgtttgaatttaaaaccgaagtgattgttttcaaaatgtatttacggatttgcttacttgttgaattcattttaattacctttagtgaattgttactttggagtccttaaagttttcaataatttttttggcagatgatactcaaattacttggcacttaaatgtactttctttcaaactcatccaccgagctactcttcaaatttttaagtcttataacacagatactgttaatgtaaagtgaacattatgactggatgtcaggagtatttgaggttctataccagttcaggctttgcttttgttgctattgttgatgctatattgactaatggttttacttgtcagcaagagccttgaattgtaatgctctgtgtcctctatcagacttactgttataatagtaatattaaggcctacatttcaactttctgtgtgttcttgcctttatggcatctagattctcctcaagactcagcaaatagtgctgctgctattgctgccccagccccaggcccagccccagcccctgccccagccccagccccagcccctgccccagccccagcccctgcccctgccccagcccctgccccagccccagccccagcccctacccctgcccctgcccctgccccacccaaccaacccaatccagtccagccctgccccagcccagtcctagccccaggcccagatactttcagacctatcccaagcccacttctacttagagaaattcgaatcttcattgattcagtgctaaaatgcagtgtccatcactcagcctataagactgagacagcccatctataccccctccatactgacttctagagtcatggaatttcacttaatgcatagaatcgtattgctaaaatgcagtgcccatcactcagcctataagactgagatagcccatctataccccctccatactgacttacagagtcatggagtttcacttaatgcatgcagtcctattgctaaaatgcagtgcccataactcagcctataagactgagatagcccatttataccccataccccctccatactgacttctagggtcatggaatttcacttaatacatagaatcgtattgctaaaatgcagtgtccatcactcagtctataagactgagatatccctatgtataccccatactccctccatactgacttccagagtcatagaatttcactttgcatacggtcctattgctaaaatgcagtgtccatcactcagtctataagactgagatatccctatgtataccccatactccctccatactgacttccagagtcatagaatttcactttgcatacggtcctattgctaaaatgcagtgcccatcactcagcctataagactgagatagcccatctataccccctccatactgacttccagagtcatggaatttcacttaatgcatgcagtcctattgctaaaatgcagtgcccatcactcagcctataagactgagatagcccatctataccccataccccctccatactgacttccagagtcatggaatttcacttaatgcatgcagtcctattgctaaaatgcagtgcccatcactcagcctataagactgagatagcccatctatacccactccatactgacttccagagtcatggaatttcacttaatgcatgcagtcctattgctaaaatgcagtgcccatcactcagcctataagactgagatagcccatctatacccactccatactgacttccagagtcatggagtttcacttaatgcatgcagtcctattgctaaaatgcagtgcccataactcagcctataagactgagatagcccatttataccccataccccctccatactgacttctagggtcatggaatttcacttaatgcatagaatcgtattgctaaaatgcagtgtccattactcagcctataagactgagatatccctatgtataccccataccccctccatactgacttccagagacatagaatttcactttgcatacggtcctattgctaaaatgcagtgcccatcactcagcctataagactgagatatccctatctataccctctaccccctccatactgacttccagagtcatggaatttcacataatgtatagatttctattgctaaaatgcagtgcccataactcagcctataagactgagatagcccatctataccccctccatactgagttccagagtcatggaatttcacttaatgcatagaatcgtattgctaaaatgcagtgcccatcactcagcctataagactgagcccatctataccccataccccctccatactgacttccagagtcatggaatttcactttgcatacagtcctactttacttgtccatggacaagtaaacaaagaactcttgtccttcatgttaatcaagatacaccaatcaaacaagagttttatatcagagacttgccatggaggtatcatctctcaagtctcctttcctttaaggaaagaaaaccattctgtcattgctgtagtagtcacagtcccaagtttctaagcagtgttcagtcgtcttttctcatgtattaccttgagtactgaataattctgtcagaaatattttgtccattggattagactttagctagtccagccctgtgtgcatttagcaaaggggcaaacacaggtctgttatcagacagttaaagtgctcagtcccaattttcaaggcattggccattaaagggggtagaatactatatactgttggcatgctgtcatgggtgctatcgccccaggtcacatctttctaactgatggagatacatttatttgctcatgatattgtatactagtctcacatgctttcttatttcagccaaaaacctctgcactggaacattttatgtggataatcctgactaggaattgagtcttttctcaaggtcctaatactacccttgctttatgtaaagagggtgctgattacttaatgcctcttacacaattgtgcaaaattgcagttgttcaagtccccttctgttagtaaccaagatcccataccctcataccctaatgggtgacaatcaagggtgccaaccaatgagaccacttctctgttctggtctttctgctgtgctggggaatcaaaccttgagtcttgtgtacgctagtaaagcactgtcatagagctacagccccaccgtgtggtggtttgagagaacagcctcttatgtagcctgggctgggcgggacttacaggcattgccacctgtaatgtaaacatatttgtgcctgttgtgtgcacagctgcatttgtccctcttcctaagcattggataaagaaaccaaactaagtcaagtcattttgttggtaatcaagaagacctttgatctgtcctgtttttaacttccaggctggcctggaacttagcatataacccaggctagccttgagctcaggatctagcctgcgtttaacaagtgttggcatatctggttcctaccactatgccctgcatgcagtctttcatattgtgaatgtgcatatgtcatttcactgtagtaatctgcatctggtgaagacttatttgtattgcagcagtatttaagatccttaacatagtaaatgtgcacagtgttaactctattgtacatattctcatgtccacagttgtgccttttagatcaggactcctgtacttagcaaagcaaagaggctcactaatataaagcttctttcatgagactatagattgaaacgattccaatacggtcaatggtccttcaaggtaagacttctgtctctgatcattcatatcctctttgctttatggaattatgtatgtgctgtgcacttgaaaccccttcctcaaactatttatgtacatactggcaattttagtaggatcaattttactcttaactttgaagtacagaagtggtgttgacctataaggtcccattttgtggcttgctaataataatgactgattgtagtaggccttttctgttcactacagaaggaaacctgaacagcgtaaaactgtaatggccataaacatgtaccttgcatattagtatgcatttactgcacacatctcattccatttggatacgatcctactctcaaacccttttgcagtacagcaagggtcactaatcttttggcttcttcatcttcctggacactggataaggctgtcccctcctttccactctttaatttccaggactattactttaaagacttaatatttgcataaaggatggggtttttaattgataacatgtcccttgaacattaatgtatataacagggacatgatccattcattttaataaaaatacttggccagttaatgtgtaaaattacacttatccacaaccttattacttttcggaccattgtatctcttgcactcctgcaagggataccgtttatctcccaaggtccctgctagtggaccattaatatacagtgaatcttcctttgtctttgccagtaaacaaaggccatactccttcgcctttcatttgcactatatcaggatatgctgatcaacaaggccgcattcttttggactgttatcatatattaaatgtatgcgtatgcactgccacctgctctgtgcacttgaaaggatcccactcacttccttagcaccttcagcaggaagtgataataagctcaagactttcatttggaaagttcacatgtctaagcacttctctaagaactactgtaccctcttctccgctttaaagcagaaagagggttgtacgaagtgctcttcatttggacttaagtgcattaatgcagttagttgtccatcattacctttggagttggattttacatccttgtactcttttgacaccagaggcatattaattatttctgagcacttctcttgtcaatattaatctgtacccttacacatatgacctgtgcggcagcaaaggttctgaaatgcctaccttttgactggggctgctgagtggtagtaactattagtaacctcagcatttggatgattactatgcaaaaatgtcaaggacctgtgtgctctctttgcataccatcaaggctactgagtcccagaattaattgctaagttatgcgtatttataactatgaatgtctggaatattttgtcccctttacattattgcagaggttgctgagcccccgaaactacccggtactgtcaatgagcacaggggctctgacgaatgacctgctctcttccttaaactgattttgggactcttaataggcacaatggcagttctggatggtttattttctactccaacttgagcaaatcccctgctagtttcccaatgatataataaagtacagcagtatgtacacccaacaatgacccggatttcgaccctttttgcattgctttaatatatacaatcctaaatagtcacaatctcacactttatagtgttccttttgcccggcctctagtttgtccattgaccacttttctgaatcactaattctcacaaacccatcattaaggaagagtttgtgccctttctcaattccatcatgccatcccttttgcctctttgtttgaacagtattgactgggcaaagcccttctcttgacttaaagtcaacaacaccagtttactcacttcatatggctacagtgtctcagttgccttctccttgctcccactgaacagagacacctcgaattcttacattattctgggtaatgttaattaccccaaacaccctatgtgtcattaataaattttggtgtatttatacactgaatagcaaaagcaggccaaaactaggtggatgagccttcaatctttaacttgcacttctaaattattccaattccaactgctggcacattctagggccaggaaccattcttgcctacctttattaatgctttattgtgcaaaatattgcaggcaagtagctcagggagttggattgccaccttttacttggggctttcctttacagtatgaactgaaaattgtcttcctgagaaggaagcttagcacttttctttccattcttcctccaggaaggagccaactgtctgcttaagaaactttaagcccgattttgtatattgctactgtacaggaccaactgccagaaaagttattgataattttattccttaagaaaggcatttggattgcaaggtggattgactgtgagatcattagcttttgtgaagtaaaaatagccatttgtgtcatgtttctgaagactaagcagtgtctcagtgtactgagggtgatgagtctgtggaaagatcagtgcaactattgcagaatgtttaagacaagtatctttgcttggtctttactacaagtttaacaaaacgaaaaagtcaatctttgtgtggcctttagtatgattaactttttggaagatgacctaagccttctaatcattatattttgtctgacattggtcaccagtccttgcttatttttaaaaggtgactggatggattaaatttgagaacatgtcaagtcgcctttgaaaattatataggccatcacatttaattaattcattctatccaccattaaactctggcaataatttgaagtagcttgaaaattcctaaagtgggaatttattttagagatgatagaacctgtttccccactttacattttaaaatatgtctgccaggatctaatcattcctttaaacgtacacttcaaagagagattttcctagtaagaaaagagctttctctagtgtgaagggtgctttgtagccgccgagtacttaggtcttttttgggagctattgtgtatgagtgtatgtatgtgtgtgtgtacatgcatgttgctgcgcgcagtcattcattcacatggtgctcagacaacaatgggagctggttcgtctatcttgtgggtcctggagatcaaagtgagatcatcaggcttggcagcaagtgcctttaccctccgcgtgccatcttgccatcccgctgctgagtgtttgatatgacattgctgatgaaaataatcatcacaacagcagttctcccagcattactgagaaatgatactatttttctgaggaggatgttcaagtaactcatccagtgcaggatcctgcttgaactactgctcctccgttacatcagactctggctgtttagactacagtaagtactaccttgttagctactaagctatctttttctcattcgagtttctttctgtgccacccactgaaaagtcaaagtgactaataagtcactagctcttctcagcttatccatacacaacacatagtatgccaacgaaattgtagaattaacacattgtgtacccaatcgccattatgctggggtacactaaaatgagaagcgatgatattttacaaaatttcttccgtgagatgattatgttatttaagacttaatgtaatataagcacacttgagatcattttaggaaatgtactgcctgtgtgaattgtttaagtattttaggaagtctactggggttgaaatttgacttcttaaagagggaagtgtgcttactttgccttgttggtccagacgactattagtaccatctggttggtttatctgaatgccatctgtttctatctacctcttggaagcatggaaagaatattaagagtgaaagactccatgcattatgcttagctgtacgccaagggtagcaagagatgagcttgtgtaggaattgggaatataaatttgataatttggttctttcaaccatttttactgcatttctgcccagaacagaccactggacggcactaacagcttagacagagaacttcatagcttacaatctttttttttttttttttttttttttttttttttacaaaagtgcaaagaaggataagttttatgaacaaattttactatggactactttatgtaccctccttgctcatttttctttttcattaattaatcaattaattttgttttgttctctgttttgttttgtgacagggattctctgtgtagtctggctatcctggaactcaaactcaagagatccgcccgcagagatccgcccgcctctgcctccagtttagagtgttgggattaagggtgggtgccacactggacccctgccagcacttttcaacagatactttcagttaaaacaacaaatacttgactcctgtgtagaaaatggtctagctgaaaaaacatccttgtccataacacttaacatttttttgcatttgccttttgtacgtgcaaatgaccctctagtactttaacccttttaagtccactgtaaattccttcgcagcaggtttcccccaactccaaaggcttagcattgtctggctctctaggtgataatacatctagaactattgagtcttttaggaaactaggaccattgttgtacaagtaactgcttcaaaaggaaacatttgcaaggaaaaaaagctttttgagatgctaaagaatgtgtttggtgcactaagacagttagctaaagcttcggtctcaccttagcaccattggctacccaccccagtacatgcaaagtgaccccccccccaggcttgcctaggcacctagagctttcagcctgcctcctatggacctaaatagagattaggactcagactccagttagtggcctggaggaagctggtactgctgctattcacagtaaacccactatcactgacagttccctattgaaatgatcaagttgtgtgagcaggcagatcattaatcagggccaattctgtcatggcaacctagtcctacatgacctccacggcactgtaaaatacacacttatttgtagtaggacatctggaacatgagcttgtctgtgattgaaatgtccattaggaggtgccatcacacaaaaccatctggaggccatctttggtccccataattgatggaatacaaagagttccccaaattagtgtcctgacccagccctcactgtcagtaatcatgtaatggaaagccaccaactcgccatcaccatcttcaggctgcctgaactgtatacattaagaatgagctttcagccgggcagtggtagctcgagcctttaatcccagcacttgggaggcagaggcaggcggatctctgagttcgaggccagcctggtctacagagtgagttccaggacagccagggctacacagagaaaccctgtcttgaaaaaaaaagaagaatgagctttcttccaagctgtccaatggcttgacccagacttaggagtttgtaaacaaagaaccctgtagaacaagtgaatttgagaatgtacaccttcattaagtggtgggaagtggaagtagtggattttgccagctgattttacaaagccctgtggcagaaccagaccaggtctttgtatgcatactgccatataacctagccactgtccaacctgtgccctctctcccagtccagtgaacctcttctgcctgccccttacttagtcctctggctcatcccaggggaagatggctctatttgtgtagtcataagaaagttttgttaattttaaataaaacaggaaaagagaaagctcacttaagacgagagctggagagatggttctgttagtcttccagaggtcctgagtacaattcccagcaaccacatggtggctcacaaccatctgtaatgacgtctgactccctcttctggcacacaggcatacatgcagatagagtactcaaatatacaaaaagggaaaagaaatgaaaggcctttgaaatgtagacatgctttcaattttaaaggctgttttcacatctcttaagaactaggggttccatgagaacatatcctcaccctgagttcttaccaccaattgaaaacgctgacatgtgcatatgaagattgtattgctagtaatcaaattatcatttgtagagtttagtataattatcatttgttttccagggatgaatttggagtctgttttgtgctcctgcctcaagaagaaggattgcctggatttagaggagtgaagagtgctggagagagcccaaaggtatttccgttacttggttgactgagatagtatcttcccttaaaggtctaatgtgtcaagttatacctcctaagtaaatacctcattattttcatgtggaattttcaacaatttttgtagtctaatgatagccttgtatttcttcacagggacaaacaatccctatgtgagactcaaggactgccagcagcctatacagctacattacatctcagcagaacttctcttcaagtcctcgctactctgaacaaaaagcttacaggccacatggagaaaaaaaggtactttggagaatttgctatttgggggtttctatctgatctccagttcatcagagaatgagggggcaagtcaataaagcactccccatctcctggtcccctggcatagtcagttagccaatgagatccttgccttatgatgaggccttgaaatcatccccaccatgttatgaccaatctgtaacatttctgctctgaaatgcctaaaaggtaggttatcagaggaatgaaggccagtttctgacaccctagtcttttgtacttgatagagtaagtagatatggctgttgtcacattctgtaggcctgtcataattctggtctctgaatatcctcaaactcagaggtccaatgctacaccagtttctagggacatatgcaccataagcactgagccaaacaatgctattcaccttgccagtgttctggcatggtattgtttaaagcacaaattaaaagaagaaaataatttaacccctttattcccagagtatttgaagtacaaggactttaacacaacctataatctaaaggatctctcattggtaggtgacagaataaaagccagaaagaacttggatggagcaattctcatgtctctaagttaacactaagatctacaaatgtgaagggttcactctccaagcccctccccatgatttaacacaactgctggttactacataatgagacaactttcccagtattcttgatttcaagaattggcttttctttcacctcttttccagatctccccccagaattgtgggcttgctgctttgcagtgctggcgacctattccctttgacgatccctaggtggagatggggcatgaggatcctccaggggaatagctcaccaccactgggcaacaggcctagcccagatttcagtgagacgctttcctgaacccagcaaggaagacaaaggctcaaagaatgccaccctacatcaaagtaggtaagttttctgcaacagtgtaataattttaactttgatcttgttttccattaaagtcagccttttacttgagatatatacataaattttatctttttcccacatctgggaaatgtaactaaacagtgcaaatgtttcttctaggagaaaagctgctgcaatagtggcactgaccttcgaggaagccattctgctctatttggttctctctccagaagctaggaaagctttgccagctgtttacatacttcaagatgcactgctaccctactcatgccatataatacacaagtgagtagcttatttacctacctagctatttacgagtacactgttgctgtcctcagacacaccagaagagagcaccagatctcattacagatggttgtgcgccaccatgtggttgctggggattgaactcaggacctctggaagagcaataggtgctcttaaccactgagccatcactaacattactgatgatgaatgcctctaactacaaatggaaacctggctggaattgatacagaagtatctatcattaggcagaatttaaagagccaggatgttctagtacttctttcctggcattcatacagcttcttttgttctttgtagtgccatctaccaaatattacccttccccaaagcagcacagaaaactgggtcttcagcgtgatcaagcaatgtgaacacacaaaaggaaggcagctttataaatgacccgaggatcaacatgcctgactgcagcatcttaaaagcaatagaatgaggtaagtcactagcattgcagtcttctgaggatttgcatttgctggaagatggtgctgggtggagagcatctaatgtgataatgtgaggcagggccatgtacacgatggaagatgaacaggctttcacgttatcaaatggcctcacagcagcaactcaaactattatctgcttaccagttatatcacaagaggaatttagcttctaggttttgttgttgttgttgtttgttttggcttggtgccctaccattcttacagacttaaacattgaaaagctttaaatagtttatttcttatctccatctgtgaagcagccattagacttgtgaaggatgtaaaaaccaagcccccccttttttttaatagaagaggagagtgaagctgacaattaaatatgcagtcgcttatagtgtttgctgcttacagaagcttttaatccatgtaacagaatgttgagatgttcattctgtgtttaaatgtaatattccctagatgtatgccctttggcaatttagttctgctaagacctgtctgtttgtgaaggtcaaatgaaatcatgaatggaaagtgttgagtacagagcctggcaaatatgccctggagttgcatgactaggccatttggaagagttgacgggtgtgtcctatggtcctatgttaaggaaaccttaagtttaacgttgatagcctggtacagtgtactaatggcaatttttttctttgcccttccctgtttcttgttaccctctttctggtggtctttgcttactatcaatcattagtgtgtattgtgggtgtgtctatttcttgttttatgtatctattttttccttggtctgtgtgtctaattctttgttacatctatttcttccttgctttgtgtgtctatttcttccttgctttgtgtgtctatttcttccttgcattatgtctaattctttgttatatctatttcttccttgctttgtgtctatttcttccttgcagttgtgtctaattctttgttacatctatttcttccttgctttgtgtgtctatttcttccttgcattgtgtctaattctttgttatatctatttcttccttgctttgtgtgtctgtcttccttgctttgtgtctatttcttccttgcagttgtgtctaattctttgttacatctatttcttccttgcttttgtgtgtctttctttcttgcttttgtgtgtctatttcttccttgcagttgtgtctaattctttgttacatctatttcttccttgcttttgtgtgtctatttcttccttgcattgtgtctaattctttggtatatatatttcttcattgctttgtgtgtctatgtctccttgtgttgtctaattcgttgttgcatctatttcttccttgctttgtgtgtctatttcttccttgctttgtgtgtctatgtcttccttgctttgtgtgtctatgtcttccttgttttgtgtatctacttcttccttgtgtgtctaattctttgttacatctatttcttccttcctttgcatgtctccttctttcctttgtgtgtcttttctgtctgcagtgtgtcttacctattcccatgtttctcctgcatgttctttcttgcagagctttgagctttgtttcactttctctggtgcctgtgtggtctgctttgtcttcactagctatggctctctgttttatctatctggttgctatttctcttagcttttctttcactcctgcctttcgtgactcccctttgggtcacatgttgcatgcatccctctctttttcttgtgctcaccccacttgttctttgttcaagttctctttgtcagtccatttcagttttctttctgctgcttctatccttagtgaattcttgtttacatttcttccctgcctttcttgggccactttctctgttttcttttgtatttgtgtctctttgctattggtggatttcttatctcagcatcattctgttgctttgtgtttgcttgtgtttctatcttctactttcctcctttctgttcactttgagcatttcatctctttacaagtctgtgtctctcttgtattctaaagtaatcctttcttggatgtttctttgtatgtacatgtgcgtgtgtgcatgtgtgttatgtgtgtcatgtgtgagaggagcttcatagccccttcccaataggtccagaatgtcacccgtggagccgttcctcacaccagactgccctgagaaataatctaagacaaaatacatcattccgtccggtcaggattcaagtggctctgaagtgaacgcccaagtagaagacagaagttttgcgacttgagatttaaaaggaccaaaatacacagatggcccgtcttgagctggctggacagaatgctgacaacccaaagaagaggaactgtttctacaggacacctgtgacttccaagagcggggaactacgtatgtcataagacacaaaacctgagctaagtccaagcataagacctaaggacccaatcctatatggacagaatatttaagagataaaggcctatggcccagaactctggaaggatatttctatccttctatccccaagaccaagaagggaaattcgaagatgagacctgccccccaaccccagcatccctttccatttcttatatttctatttaagctgtcttcacttgagatgtaatttttcattgttgccattgcccataaaggaatacgtttttagctggatagtattgtgcaagggtctgttttaaactgggtcttagccatttgttaaattgttgatgttttacaacttccatttctcttcacatctgctccacttgagacggaactaaatccagccagtgtatatagcctgactattgaaacttccctaggaataagcatgcatacagatatgcatactgccatcctccctacctcagaagccctaggctgacaagaaaaggaaagcatcaggttgttagggggaaaacaatgtcaggctatctagagaaaatataaagagttgttccagaccaatgagaagaattagacaagcaatatgcagatgtgccaaccctctgagaagcaccagccagtgtcaccttctttctttgggcttaggtgagcagggtatggttttctaataatggtttggggacaaaatgaggtctgaactccctgctcatagtagtggccgagtaatttggtgcatttcaccaaaggaactcctgggtctaatacctacctttaaaattaatgatgagagactctaaggactacttaacgggcttaatctttttcgtgccttcctcttcctctgtaagagggaagttaaatgacacaggatgaaaaagtaacatgctcatagcacattggcaattatacatggttattatctgaaagtgtagagcttttcctataaggcatcagactaagtacctgaagctttgtgggttcatggtcttagttgcatattccttagttgcaaatccttttcaaaaggtaagaaaaaggcacactggtctattgcctgtacttgatcaagccctgatatgaatgccagggaatgtctgagtaacattaatttccttccctgcatattttttgtgctgaatactaaggctgtgatgcttcactgtggtcacccccaggtaacaagatattaccaggtaaccaggaaacgtatgaatacgtaaaccatgaagcctactgtaacttccaagtcagtgctgagtatgtattacatagtagctgaagtctacgcctctgtgtgctataggcacaaagattgctctaggaataacatgctttgtaaaaacaaatatatgaacataacggggcttgaatgaataacagtccatatacttaaggccagtgtgtttcttctgctttggtgaggctcagtaagttatattataccaggtagcagaagagaaaacacatggaaactgattttaaactacaaactaggtcactaatgcaggtgattgattaccctattctgatcaccttctaatttctgaatacccatgttcagcactgggaataacaaagggggacattaccacagaactagaatttacaaaagaatgcattaaataaagcattatacagctatcaattgttccatgtgtgcaaatgaatgactactaactacctctgatgtatccgatattgttttgggtacatgaaatattcatgagtaactgccatgaaataagaatgtttgcattccatactattcataaggaatgagccaatgcttaatttaatcagtcaaaacttgagtgataagggcatgttaatacaagaacatttgcccaggtcacattatggttgtgggtactttcttaactataaagcagttcagtagtataagacaagacaaattttctatagaaataaagctgcctataaaataggcatagtctctacaaaattttcattgtactttttagcccataatgggaagagtacagttaacaagctgggtgtggtagcatgtgctctgagctgaagcaacaggaccacttgagcccagaaattggaggctagcctgggaagaccataaggtcaatctcaaacctggaggctaaatattgtctcccatgtgtatattctctttcatgggtactggagagatacacagacgtacatttcagtgtgtccacacttgagaataatatgtacgttggcattttatgaactcggaggtaccatataaatgtaacaattcattttcttacttggtatcaatttccaggcttttaaaattctgccacatttattatactgtgaaaataaagtaaataagtaactgtgaaccactgaatatatgaagcattcaatacttgatgagtacatactgaatggcagtcatttattacaaaacagtgcccttgctaggcactgggatgcaaagagcattctcattgtcctgtgtatctaaagaaattatgcatgagattaatttataatttgtaaactgccatatatatgtgtatatatgcaatatttgcctggtgtgcaatgactttgcttttatcccaggcatgcacaacagatctgtgtggagctttgtgaagtctacagttctataaagccgggacctaactgttggctttatcagtgaacagtgattactttctaagtttcataatggctgaaacttaatcataatgcttatcacctaacaccacctaataataattttaccatgctatgtgttgagcgaacacatagattgctttctagcattatgtagcacttataggagtgaaatctagaccaaaacttcaattcacttcaatgaggaaatgaaaacagaaaaaaaaaatggatttgtgcaaggcagtgtgctaaatgttacactgagtggactatgctgtctaggatacttcccagctggcttgactgaggaggtggaaaaggttttattaatgacaggaactttttccatccagtttcttaaatgtttgttgaatgctgctgccagagatgaattacaaacaccttgccagtaaaggagttttatagggccagagtgagataatcccagagcatgggtatcagggaacaaaacgggaagaggccagagcatctgatggcatgtactcagtgtggcccagaacctctcgaactagatgtactggctggagggaccaagcatgcagaacacaacacctaatgaaacattgtatataaaatatgctaacctaggtcctaaaactaaaatgtgaggtggacctagtgtagatcactgatcataggagacatggtctcataaagcccaggctggttctaattggtgactgtcacagcttctcaagtgctgagattacagatgtgcttaacccatgcccagcctgaagaatatatctgattactgagtgaataatatttttaaagaattatatattttatgtatatgagtacgctgttgctgtcttcagacacaccagaagagggcaccacatcacattacagatggttgtgagcccccatgtggttgttgggatttgaactcaggaccttcggaagagcagtcagactcttaaccactgagtcatctctccagccttctgagtaaatattttaactataatggctgtttgcgaaacccaaccaaggccaagattccttcaacataaactggagacttcctagctaaggaagctccaaaagtcattttctcattggcctagcttgaagccaggacagacttaaagtctgtcctttaattcattacccattttccttttcttactgttgaagtgtttcaaaggagaatcaagatgaatcgataattctaaacgtatttgttcattgcctggctcagcgtcatgtgagcaagaagaatatactatcacactcatacttttaacttaagtgtgatgaaagtgcagttctaagtactaaaatttctaagtactgaaaagaacaaagacatttaaaggatgcaacccaaagtgtactttacctcagtagtttctgaggggactgcagtcacaccttgagactacagctctcactttagctgggaaaaacatcaaggtgtagaggaggcaagttaaataaaaagttgctcccctcctcatgggcatgcttggtagagtggaaataataaaagaggttctctatttcctcggttccacacattgcagaagatgctactggatgctaagtgcaacacatttgttccaaaagggcactcagtgtgacttacagatgccccggaaagcagagggatgctctttattaaacagaaatattagctcaaacgttttctagactgaagaacactttcctcatttcccacagtttgcctcagaggttgaatacaggaaggttattattcattcatttgctttattggttcgcctgttctacaaggatttgcatgtctcttaggccttcacttggctcctgagacatggaaaaaggaaacatagacatagggaagtgctggatggggggggggggtctcttttctgggtagtggcacgacttagtccttagtccccaagtaatatgcaatgtgagtcctcatcctcatgtcttctccggccactgcaatgagtgggaagctgggctttgtagcaagcctgaccctaaagttacagaagccctccacgctaagaaactcaattttctaggccattttagctatgactgtgaccactactggtcaggagggatgacagccatctaagttccacaatcttaggctactttgcattatcctggggcaaacaagccatttttgagctgcagcaggctttgaaatacattgaccaattttgcctgtgttcgttaaaccttttacctttttacatgctaatgctcacagtaatttagaaatgttctccttactataatatactcaaggtggcttgctatggtaaaataatgccagtggatgaaaataacattaatgtttaacattcttgcataaaatttaagaataataaaattgacaacaatcagaaaactggaggaacgaaagaccaaattgaaagaacttgaaaaagattaaaaatgcctgtgctttgaccctttccatttttctttcactcacagagggtgggacaggaggccgagtgaaggaaagggtccagcctgtctatctggaatctaagttgggactttaatgcagttccacaaaattggtattaattcgctaaatgtttctgaaaatgtattttcatctaaatggctatcagctaagccttgagtcaaatgggaatgaaacagattaagtcaatgtgatctctttatccaagttgccttagagctgaagtcacaatttgctgtaaggaagcttattcattgtagcatacgcatactttcaaagtatctagactttacttagtaacccaatcaggacattcaggcaaaagaaaaggaacagagaagatggagccaggttgaagaggtctgggagttcaaacaaatttttttcattttcattaaaactcaattgggcatcaaaagtgttactaatattagcttttaattagtggaaattggctggattcagtaatatccctttgtatgggtaggaatgggcttacatttctggaatttgcaaaggaaaaaataactgaaagccttcctttcacagttactgccatcaatattgctaccaattaagcacatcctaccatcatctgctttgatcacataaatgaactgtgtaccaatctgttgttgaaagactggagtcatcttcccaccaactgtgaaaaaacacatggaaaacacctggactttgtgaacggatgcggaatacagaacttctgttgactcttgggtgttttgaagacttgaaaaaaaaaactgttgcttaccaacatgtcacaatgagtccgtgtgtgggtgggtggatgggtgggtgggtgggtgggtgggtggttgagtgggtggggtagtttgctgttaaataaaatgctttgttttgaaaacatcatgtgctgtatatgatattttccttaaattttatttaatgtgcatgagttttgtctatgcattaggtttgggtgttatacccgtgtaggccagcagagggtgtcggatcccaaggaaaccaagttacagacgccatcttgtgtgtagccggaatgtaattcagatcccctggaagagcagttagtgctcttaaatcagttcaccttatgctaatacaaggagccaacaaaaccacaaaagcctcatctacaatgtgattggcaagaagagaaagatagacaggtactgcaagcgagtgtgagtgaggcaggtacaagaatctattatggtatcttaaccactgccacattccccttttcctttgcatggagccagaactaggctagcctccaagtccctaagtagccggaatgactctgagctcctgatcctcctgtgttagaattacaggcttgtaccactaagcctgcttttcagatgatagtttctaactcagtggcccttttatcataccagatacctcagttttaattccctatgtaatgaaattggttatgttgccctggccatctggctagcctgaagtccatgtagattaggctggccctaaatccatagagcactgtctgctactgactcaggagtgctcggattaaaggcctacaccaccaggcaggcctagccagttccttgggtaatttgaggtctcataacttagagcctaagttgttcaggagaaagattatgagaacacaaatctaataagatcacgagaagcaaaatattgaggctcaaaagtgggagtactggtaagatgaaatgaaaagaaagaacatggctgtcaagaagtccttgaatagagaaaggggcctctgatagttctaaaattcaaagtgacaaaattgcgtctaggagaaaagataaattctctcaggagagagtttgtactgttagacatggctctgcctagccattgctaaccagtagaagtgctccaacaaaaccgggccttcgtttccatccaatgaatgggccagaaaagcaacaacattttacctgaaatcagttcaccttatgctaatacaaggagccaacaaaaccacaaaagcctcatctacaatgtgattggcaagaagagaaagatagacaggtactgcaagcgagtgtgagtgaggcaggtacaagaatctattatggtaaatcttaacatctttggaaaatagcattggcccaactccaagaagcccatgaaaccttaccatttattactggcaactaaaggattgggacacagggcactcaaacgtatccactgatgagtatttaatagttccaaactatgtctggggtgaactatgaaacactaaacaaaataaaactagcaaatatgacagagacattttgtaaggaataaggggtgctggccagggcgggagggaaattgaaagtggaagagtaagcagaatgcattctatatacctatgaaaaatttctaataaaaaaccctatttaaagccgggcgtggtggcgcacgcctttaatcccagcactccagaggcagaggcaggcggatttctgagttcgaggccagcctggtctacagagtgagttccaggacagccagggctacacagagaaaccctgtctcgaaaaaacaaaaacaaaacaaaagacctgtctgagctggagagatgatggctcaggttaagagcactggatgctcttccagaggtcctgagttcaaatcccagcaaccatatggtggctcacaaccacctgtaatgggatctgatgccctcttctggtgcgtctgaagtcagcaacagtgtacttatgtaaaacaaaatgttttaaaaaatagaaaggaagaaagagagagagagagagagagagatgctctcataaacaacgtggaaggccagatgcacacctgaagttgtcctctgactccattatgctctgtgcaaccctcacccacaaacgtgtacacacaccatccacattcatatacaatacgcatcacacaaaagaaggaaggaaggaacgaacgaaaaagagtcaagaggagggctgccagcatccttgccctgatggctagggtcgctgcacgggtcagcagcactggactccctcgtctgactgtcaccctggtcatttagaagccaaacactgcgattcttcaaaggcgggatctgggctaagtaaggatgtggctcagtggtagagggacagccagggcctcgaactcagaaatccgtctgcctctgcctccggagtgctggggattaaaggcgtgcgccaccacgcccggctttaaataggattttttattataaatttttcataggtattgaagaggcacacatgagccccttcatggtttgctagaataaatgctcttggtgatataacttggtttcctcagcctgggttcctcaactagaaacaggcagttaaggtccaaggcatgagttgtgagctgcccgggtcttccaggcaacctgcaagtgacaggttcttgctatgcatgggcatccttattccccctgggtgaggagctttggaaactcaggggcagggagactccttctgaggcttctggaaagagagaatagatgtgaggatcaggtagaagttcccagactgtccctgccatccaagagggaggcaggagctgggctgggtatgggtcacaaagccagcagctgctagcactgagggtccttgcctttctgtcccatggcccctctcccatctgcactgtggttgcagagcctgagccagcacttcccccgactggagaatgacagaggcagagtccactcctcccattccggggcgggaagccaccatgttgcacctgggcccagcagggcctgggaacacgaggagcccacggcacccaaagccctcccctcaacccaggtccttgcgcaaggtcaggagagggcaggcaagtggccattaaaactgccctcccggcacaatggcacagtgaggtgaagctggcacaagaataaagaagaggaagaaatagagctgtagatagaagagacagcaacgtgtaataacatggcgccttcaagggtcaggaagggctattctgcaagtaatctcaggttaattagttcctctgtgctttactcgaaccaaaatttgtctcctatcagggagagaaggtggagtggataagattaaactaagcacacacagagacaattgtttttgcttttgtttttctttcatttttgagtcagggtctcacattgcagtcctggctggcttggaagtctctggcatactgctggaaacccaagcactcaccctaaccaagcactcaccctaaccaagcatgcaccctaaccaagcactcaccctaaccaagcactcaccctaaccaagcactcaccctaaccaagcacacaccctaaccaagcacacaccctaaccaagcactcaccctaaccaagcacacactgtaaccaagcactcaccctaaccaagcactcaccctaaccaagcacacaccctaaccaagcactcaccctaaccaagcacaaactgtaaccaagcactcaccctaaccaagcactcaccctaaccaagcacacaccctaaccaagcacacaccgtaaccaagcactcaccctaaccaaacattcaccctaaccaagcactcaccctaaccaagcacaaaccctaaccaagcacacaccctaaccaagtacacaccctaaccaagtactcaccctaaccaagcacacaccctaaccaagcactcaccctaaccaagcactcaccctaaccaagcactcaccctaaccaagcacacaccctaaccaagcactcaccctaaccaagcacacaccctaaccaagtactcaccctaaccaagcacacaccctaaccaagcgctcaccctagccaagtactcaccctaaccaagtactcaccctaaccaagcactcaccctaaccaagcacacaccctaaccaagtactcaccctaaccaagcactcaccctaaccaagcatgcaccctaaccaagcactcaccctaaccaagcactcaccctaaccaagcactcaccctaaccaagcactcaccctaactaagcatgcaccctaaccaagcactcaccctaaccaagcatgcaccctaaccaagcacacactgtaaccaagcacacaccctaaccaagcactcaccctaaccaagcactcaccctaaccaagcactcaccctaaccgagcatgcaccctaaccaagcactcactctaaccaaacactcaccctaaccaagcatgcaccctaaccaagcactcactctaaccaaacactcaccctaaccaagcactcaccctaagctcagttccaatagaaagaataactaaaagaattctgtagacaagggagggctttctaggtttaaaattaatttactggtccctaaaaaacaaacaaacaaaggggctggagaaatggctcattggttaagaatgctggctgctcttccggaccggaccgtggttgtggttcaattcccagcacccacatggcagctcacaactgtctgtaagtccagttccagggtatctgacaccctcatacagacttacattcaggcaaaacaccaatgcactaaataaatacatacatacacaccgaacaacaaaagactacaggtctgaaaaaagccagtaggcattgcaagcctggaggtggtggaccatggatcagaattcaaggctgggctgggctacatgagagcctttaaaagtaagtaaataaacaaggccttattctctattcccactagggaaatgaagcaaactataattggatatccctcgcatctacctacttggaatagctatctagaacctaggaaccagctggtgttggaggcaagggcctgtaaccgcggcacttgggagatttagagcaagaagatgaagaattgggtctatcctgggcaatgtcatgagactctgtctcaaaaaaaaaaagaaagaaagaggagagagagagagagagagagagagagagagagagagaggaagaagaagaggaggaggaggaggaggaggggggaggggaggaggggaggggagaggagaggaggggagaggagaagaaaaagaaaggaaggaaggaaagaaagaaggacaggagagctggaaagatggctcagtggttaccaagaacatttgctactcttctggagcccctgaatttgttttttgtttttttaaaggtttatttattttatttatattagtacactgttgctgtcttcagatataccagaagagggcaccagatcccattacagacggttgtaagccaccatgtggttgctgggaattgaactcaggacctttagaagtacagtcagtgctcttaactactgagccgtctctccagctcctgaatttgttttttgtttgtttgcttgtttgtacgttttgagacagggtcttgtagcccaggctggtctcaaattctctttgtagataggatgaccttgaatttctgacacttctgccttgacctcagtgctgtgactacaagcacacccctcacctggtttatgcaggttccggatggaacacagggcttcaggaatggcagagaagcaagttacctgactcttgctcagccattttgaggctataggaggagggggacaccaggcagtgagtccccatgtcaaaaaataagtcgagccaggcagagagggacgtgcttttaatcccagcacttggcaagcagaggcaggtcgatcactgtgagtttgagaccagcctgggctatactatatagtgagccagccagggctaccctggaaaactctatctcaagaacaaatcaatactgtactctcctcgaccttggccagagaagtttcttctgcaaggaggagcagctaatgcagactcagagctggcctgagactgagcaacaattgcatgcttagctccaaacaaggtgtctatagcaacccacacactgcccaaggcccatggaacatcgtggaagcagggctggaaagaacatgagagctaaagatggggaggcaagctgtgaaaatgctggctgccgccctcacaagcgtactgcggctgtggctacctgcatacgattccgacaagattagccaacattccagcaagcactgctaactggactcacagggttgttattattattatattattattattattttaaaaggagacctcattaaggttataggaagacagcttcgggatgtgtagggagtgggggagaagtacgagtgaatgcatgtatgaaattgccaaggaataaataaatattaaatatagggaaaacccaacacttggaaggtggaggcaggaagggcaaggtcagcgttggctacggagcaaactcaaagccagctgtactgcatgagactgcgtctcaaaagaacaaaggtggaagaagagctcagcagttagcagcacatgttgctcttgctgagaggacctgagtttgctagcaagcacctaagtcaggtagctcacaagcctctgtcactccatctccagggggccaatgcctcagacacacatatttaaaaacaattgtgagcagggtgtggtgccgcatgcgcatgcctttaatcccagcactcaggaggcagaggcaggcggatttctgagttcaagtccagcctgatctacagagtgagttccaggacagccaggactacacagagaaaccctgtcttgaaaaaccaaaaaaacaaaacaaaacaaaaaaacaattgtgtgtgtgtgtgtgtgtgtgtgtgtgtgtgtgtgtatgtgtgtgtgtgtgaaacaaaacgaaacaaaacaaaacaaaacaaccctactttcatatttttaccactggtagtaaaatccaacactaaaaggaattcctggcataagaaatcttgaggatgaaaagtcaatttaagggtatgtttgaacatagcactctgataaagacaccatccacccatttgtctaaagtgagttagtcttcccaatcaaatcctcacttatgccaatgcctgccttaaatgttttctatgtgtagtctcctcaattaccatcaacattcaaaccatcactttcccctataattccatttaccttggactttcacttccagccttattctaatttcttgggctttcatgtttattcgtcaactttcattttcattatacaaggacctgataagtttttattgataaaagttttattatttgctatgaattgaatgcggctatgccctcatgtgtgtgtgtgtttaaatagtaagctcagatgtttacttaaaaacaaaacaaaacaaaacaaaacaaaaacatgtgttttctagccaagttggtcaggaactgactgtgtagcccaagctagtcttgaactagctgcaatccctttctgcctctgcctttaaagtgctaacaagtgtgagccacctgcccagctataactactattttttaatgtgagcactttctgttctcacagaggacctggtttgatttccaacacccacattgtggctcataaccatctataactccagttccagggatcctagcaaaccctcttctgacattggtgcccaacaggcatacacatgattcacaaacatgcaaacaagcagaacactcatacacgtaaaatctaaaataataataaagtagacctatagagtatatataattccaaatggatttcagtagaagaccctacttacattgcacagaaaaagctgtctggctgcttcaggcatgccaatatcagcacatgtaaacaagcttccaactttgtttttgagtaatcaactcattattcaccagatctgaggctatttctattcaacagcacaagaaaagaagggagaagcaggaggatctctgtgagtttgaggccagcctggtctacagagctagttccaagacaccagggctgttacatagagaaatgctgtctcaaaaatgaacacacacacacacacacacacacacacacacacacacacaagcgcaagaaagaaaccattcgaatttgactgcatatgtacataaaacctttaaataaaagacgtaatttcaaatcaaatgaggtcttaagaatggagcctaaacctgtctgtctctttaccagacgcagggcagccagaaggcagccattcacaatccaggaagacaggaagggataacaccagaacccaacctccattttagagaggtctagcctcttgagctatgacacactatttgttctctaactacccaaagttgtattttactatgctaattagctgattaagacattaggtaaaggtgttctacaaagaaactgtaaataaaagacatactctgtgccttagcctatctcatgattccttttctggatgtcttcataaccaccttaacctctacgaagatacagagacacaggtagcactacagtgctgtatttgtttaagcccccaacaaacttggtggcttaaagcaacacagatctataaccttataattttagaagtcagaagttcagtgtgagacacctagttgaaattgaaattattatttgaaattaaattgaaattattccttctgtaagttttagagaattcatttccctgccctttttagcttcaaatttcttagctagtaattgccttcctctatgtctatagccggatgtagagtctttgtcaatcttttatccctgccatttcaatgaaacaacaccttaccttctaggggaatctttttatctcaaggtcgattgattagaaacctcagtttcttcctccaatgtaatatagtatattagtatattctggggagtcagtgtttgtctgcctactaacacaggtaagaatttgcataggtattacaaaatcagtactttgcaaatctttcttctcttccgaattgaaaactgaacattaatccaaacatggcggcagaagcctttaaaatcggcactgtcccactgaaggcagtggcaggcagagctttgcgagtttgaggttatttactgagaccttgtctcagaaataaggcattaaaaaaaaaacaaaaaacaaaattcaccccaaatccgcatcaaaaccaaagctgattgttaatttccctcctttctaaactggattcattccttagtgccattgtttgctcgtctgaacacactgaataaacactaccgggagggattttccgtgcctatagtaaataagaatatgatttttcagatacgaaccactgagaattgttttgccttgcccgccacccccaccccgaaaatactccttgtcccagatagtagaaacttaatgggttttcaaagcactcagattattttcgaatttcaacgataccagagatcgggtcattatgtacctcggaaataaacggaacgcagtaccaaaattttaggtctcaacttccaaggcttctcaaagaaagttatcgcagacttagttactcgttcttggttacttcacacgctaccagtaatttttccacttttctgaatctgtgccccccccccacattctttcatcaactttaatccaaacgcgtacaatcagaaaaccccactaaagcggaggtagaatcccattggtttttagcataatcacatggcgggaaaattgttaccaaaaaaaaaaaaaaagagcaaaaatcttacctgaaaaagacacgtgcggtgaggtagtattgctgaatttggcttgagcaatattaaaatattaagactattccaaagagtttttcggacacgaggctttccctgatgtgagtgtgtggattctagaccctgctacaagtcacgcccttaactttcttttccgctctagactgcagtttattacccacgccaggcttattgaacgctttgcatatctacctgtaacattttagccaaccatctctacgctatcccagacattttcatcacctctgctctgcccagcagacattttagtcgacctctaggggttggttataaggcagggattttagcgatctccccaggtccctggcggcggcaggcattttagtgatagcccaggtccccggtggcaggcattttagcgatagcccaggtccccggtggcaggcattttagcgatcttccagatccccagtggcagacattttagtgatagcccaggtccccggtggcaggcattttagtgatagcccaggtccccggtggcaggcattttagcgatcttccagatccccagtggcagacattttagtgatagcccaggtccccggtggcaggcattttagtgatagcccaggtccccggtggcaggcattttagcgatcttccagatccccagtggcagacattttagtgatagcccagatccccggtggcaggcattttagtgacctcccagatccctggtggcaggcattttagtgatagcccaagtcccccgtggcagacattttagtgacctcccagtaagcggtggcaggcattttagcgacctcccagatccccggtggcaggcattttagtgatagcccagatcctcgacggcaggcattttagtgacctcccagatccccggtggcaggcattttagtgacctaccaggtccccggtggcaggcattttagtgatagcccaagtcccccgtggcagacattttagtgacctcccagtaagcggtggcaggcattttagcgacctcccagatccccggtggcaggcattttagtgatagcccagatcctcgacggcaggcattttagtgacctcccagatccccggtggcaggcattttagtgacctaccaggtccccggtggcaggcattttagtgacctcccaggtccccggtggcaggcattttagtgatagcccagatacccggtggcaggcattttagtgatagcccaagtaccccgtggcagacattttagtgacctcccagtacccggtggcaggcattttagtgatagcccaggtccccggtggtaggcattttagtaaagtctcccagtcccaggcatccatttgagccattagtccgggaacgtggcatgtatgttagctatctttccaggtccctgaccggtagtctaaccacctgtaagggacagacattttaaattttggctccaggacccagcagacattttagttattcctccgttatgcggcaggcattttaactatcggttcgggactacgcaggcattttaccttcatctccgcatagctggcaagcattttaggaatctttctgctgcttggcaatcactttaaccatctcttccgctgtcccgcaagcacgtagccatcgctccactgtcctgaaagcactttgccactgtcccactgtcccgcaagcacttagccacctctcccctgtcccgcaagcacttagccatcgccccactgtcctgcaagcacttagccatcgccccactatcccgcaagaatttcagccacctctccaccaccccaacaaggacttcgggcacctctccaccgtcccgcaggcactttaggcatctgccctctccttagcccgcatctcacccaccgctccgctctggccacctgtctagctggctatcacgctcttcttccatcacgcgcttgccgcagccgcctcccgggagtggatgcaggactcaagatgcgtggatatctcggaaagtgagaacagagcaagggcgccgagcgcaagtgtgtagcgcttgcaggtacttttgggaccgagtggagcacgacgtagcgcctcaccggatcttgcgagattgcgcctgacacaagcgctgcactgagggtttgagggagtgtggggcgggacctaaggctcttgaggcgcgggatcctgctgagagggtgtggttagcacacttgaccacctgcgcagagaagagggggcagagcttaggggaacagagcatggaccttgtgggagtcacagaaaagaatggctgcaacctgagcccatttgcctttgagagctgggaaagctaggccagcaggtagcagcttgcctggtcgaatggcccttggtgagtgttggaatgctggaaacccagagaccaaagctgccaggctcagctccaacacagtctcatttgtttggtttgtggcagactgcctgcaccccaaccctttcctccccagtcttgcctcctcctgccccctctcttaaactcttacggtctcaaagactgggtttgagggaaacctactgtaatggattgatatacttctccttcaattgacaagagacttaatgtcctagagaaaaattttccttaaactgtacatatccaaatttcaaaaaatgtataacagtcagtatcaatgcaaactgagcaatctgcctaggtacctataaacacacaagatacctataaacacacaagatacctataaacacacaagatacctataaacacacctagatacctataagcacacaagaagcttatagagcaccaattagactggaacagaaaagaaaatcctcctgccacataataacccaattttcttttcaaagaattttttaaaaatatttttattttatgtgtgtgggtgtgtgcagagcccatagaggccggatgagagcatcagatctccctgcagctggaggtacaggcgtctgtgagctggtactcgagtgtttgggaatcgaacctgggtcctctgcaaatgcagccactgctcttagccactgtaccatcattttaaccccaatgtcaattttcagtccccaaagctttgctggtatgtgatacaaattttataaaagtagaaaatgaggagaacttctttgcaaagaaataggatgtagcccaagggaggaaacaaaaaaccctctgagtgaaaaaggcagattcttcaagtaaaatgaatacaaaaatccccaagaatgtgatattttggcaaaagccctctataccatccaggtctgaaatattaaaagaattagagcctttcaccaggtggtggcggcgcacgcctttaatcccagcactcaggaggcagaggcaggcagatttctgagttcgaggccggcctggtctacaaagcgagttccaggacagccagggctatatagagaaaccctgtctcgaaaaacaaaaacaaaaacaaaccaaaaaaaccaacaaaacaaaacaaacaaacaaaaaagaattctagcatctttcacatacaaaagaaagtaccgaggaaaagctggaatggagctctttcatgttcttccttgagttctttgaactgaaacaaatgatggaaaatggcttctccccagaagccatcaattctcagtagaaattcaagaagcccattcatgaaaattcatggaaggccacaggaagctgcacccaagctaatcacctacctttgccaagtatactgaaatagctccatgttcttagtatgtctactgttccgtgtgcttggcacaggtctgtaattgcagcacttgggtgtatgtggtagagagagacgtttcaggtgttcagggttatcctctttggcgatatagtgagtttgaggccaggctaggatgcatgagaccctttaattcctgcacttgggaggcagaggcaggaggatctctgactttgagaccagtctgatgtacagaacaagttctaggacagtcagggctacatagagacaacaatctgtctcgaaaacaaccataaaacaattgtgtgtgtaaaattattaaattattgagctttctaggaatttaaagctttaacagtgagatactttgcttttaaatatcaatgcccaattcattcatatttcttcaaatgaacgaaaatgaccagtatgcatatgttgttactggaatgcattctttttttacctttagaagatagaaagtaatactccaaaatatttaataaaatattttaaagatggatgctactagtgattagtattataagtagttgttaactgataacattgattacctaacaaaagttgactgtgagaagatagcatttctaggatgtacaggagaaaacatactgatttctagaaactatcaccaaattttaaaaataatatttttattaattctttgagaatttggcatgtgtactatatcacccccattcctttctctaaccccttgcagatccaccacctgccaccctctctcaacttaatctcctcattaaaaaaaaattacccacagtgtccaatttgtgctgcacgtgaatgcctggatgtgaaccatccactggggtggtgtgcctaccaaggagtcaaaaaaccgtgactgtccctctcccaaaagctctcaactctaaatagtgcttccttatgcttggaatggcgattaacacaagcttattcaggcagctacagttcacaagtacagcagttaatgtcctgtcctgaaggttttgttttgctctggtccggctttgcctatacatcacaaagtctgtttcttcttctgccatggtcactggtccttggggagaggggactgcttttgaaaatgaaggtcatgaatcgacttcaggaggcccattgaacttgtgaaacgttgtgctcaatatttgccctgtatatgctttgcagagaaagttttcttgatgctgagaatcattggtgtcagagataaatccacagtctgtaaactgttgactgtagctctctccttacttagcatatgggggatgtggttattaaatgttttattgtatgcttttcctattttgttttttggagtaatttttggcaggaaaaaaagtaataaaatgaagagtttgaagttgaaaaatataaaacagcaaccaaagggaaatactcactttagaaatgagtacattcaaatatacctgagaaatcattacattaaaactatataaagtaaagccaagtggtgatgatgcacacctttaatcccagcacttgagaggcaaaggcagaagcagagaggcagagagaggcagatgcatctctgagaattcaaggccagcctggtctacaatgcaagttccaggacagccagggctgttgcattcggaaaccctgtctcaaaacaaaacaaaacaaaacgactaaccagtcaacaatagataacaacatcatgccctgtataaaatacctacaagttaatgttaaaacacaagtcaatagagtaggggaaaggcagtgtgcatgtggggagtactcatatgtccaacaaaagtaaaaatttgccagaatcaggtgtttgtttgagggaggggaatctcaggaagcttgggatatcttgttcaactcatgctcctgcctccaccattcaagtgctagcagtataagccttcttttttatttatttatttatttatttatttatttatttttattagatattttctttatatacatttcaaatgctatcccgaaagttccctataccctccctccgccctccacccctacccacccactcctgcttcttggccctggcattcccctctactggggcatataaagtttagtataagccttcaataacaaacatgttcggccccagaatccccatattcaaagctctgtaatgtagcaaaaagtccacaagatggcgatagagacaaggtgctaggttaagtagaagaggaagttcaaggccctcttttccgcagggaaagtttgtgaaatttttcctggtccttgctctagctctgtctggtggaatgtaacaacgttggaggaagcagtttcttttttcgggaaggagaaagatctagggatatcacgctcattactttctacacttatctgaacgctatctggagtcagaaatcaaatagctgagcgcatttggatagcagtgatcaaaactctggaaagagaaagtatactgcaggggaacagcgggctgctaagtaggtgtaggtagtccctgctgaataaactaaagtagccaacgacttgaaaagaaatagagagatctgcagagaatttaagaggtttaaaaggcactgtgtacacatgtgctgattttggaacttcctacaaagctgcacgaatcaaaagtacatggaggggttggagagatggctcagcagttcaaagcactgactgctcttctgaaggtcctgagttcaaatcccaacaacaacatggtgactcacaaccacttgtaatgagatcggatgccctcttctggtgtgatctgaagacagctacagtgtacttagatataataaataaataaatctttaaaaacagaagtacatggaggtggatttgaaggtcagcagctcatattgctgatggagtttacttggagtagagtggaaaatgtggacataactgtgagtctgtgttctgattgttgcctcccagaagatcaactcagggcattaatgattgatccacttacatgaacttcctcaggcagacatttaaaaattaattatagtgttgttatctaggttatgacaacatagtcaaagccagcaaaagggatgctttgaggtgacgataggggaagatagctttgaaattttgtttctacgcattctgggggaactacaaagtcatctatgtgcccattactcaagtcatattcaggagaaagggggggtggaaaaggttgaagtccttaatctgattgtaaccagcttctaggttcacaaaggcagtaaggtgaaggacaggacaacattgaaaactgcctgcttgccgggcagtggtggactttaatcccagcacttgggaggcagagacaagtggatttctgagttcgaggccagcctggtctacagagtgagttccaggacagtcagggctatacagagaagtctcatctcaaaaaaaaaaaacaaaacaaaaaaaaacaaaacaaaaacaaacaaacaaacaaacaaacagaaaactgccttctgggtattaaaagtgtgtttcaacgaacatagagcccatctggagagatagctttgtctcccttctttttgaagtttcttttttatgtgttttggtaattaccagcatgtgtaccacctgcatggctagtaatgtggaggccagatgcttgagtcagatcccctggggctggagttacagacagctgtgagctgccatgtgggtgctggaaacagaacctaagtccttcataagatcagccagtgctcttagccactgagccatctcttcagcccctttgtatcacatctttaaggaaattctgtcaagtctagaaaacagacccccatggccacacacaacaaagaatgcggattttataaaaatttacacctcaaattccaatatgcaaacacacttcaagtaaatgagcaatgggcgtgtgagaaatctttggtatgggacaagcccacacagggtgtccttgcaaggacattctataggtctcagaactgagccttcgttatgctgctggaagccatctttatctagctccgttgagtgagagtttgcttgggaacagacctggtgataattatgtaacaggcagaaactggctgaaggtgctgtagcaagtgacacaaataaacttgttcattcttggaggaggggagcagtggggtcaaaactctgagaaagaaaggacaatctatttcccaagtggcaagattataaaattcaacctgtcacagtgacaaccaaaaatgacctggtaaacaaataggaatttaagatttgtacataagaaaaatagagccttcctgctcataatgtagatgtgcagcttggccttcatgtggatcctgaactactggaacactggaacgggggctatcacaaaagctgttgcctgtccatgggatttgttctcctagctgagttgcctggtgggcctcagtaggagaggatgcacatatcctcacagaaacttgatgtgtcagggtgggaggatacccaggggccctcaccagctcagagaagaatgggagggagaaggaagaaggatcatgggagggggggacctggagttgggggcagtgagcaggatgtaaagtgaataagcaaaaaaaaaaaaaaaaaattgtctcctggagccaggcgtggtggcgcacgcctttaatcccagcacttgggaggcagaggcaggcagatttctgagttcgaggccagcctggtctacagagtgagttccaggacagccagggctaaacagagaaaccctgtctcgaaaaacaaaaaaataaaacaaaacaaaattgtctcctggaaatccagaagaccagacagaagatagtcaaccaaagaaaagacttgagtgatactgtaatctgactgtataacacagaacaatacaaaggcataacagtaggaaagcaagcttctcattgtaggctcggtcttcagggaagactgtatcctagggcaaaaaccaagtgtttcctcgggatgtgctaaacctggtgctggcccagtatcctctgcaatgatagaattctacctagactgctccatttttcagccagcctctattcagctagactccagaaaaacaagttcagtgtttggtgttttgctatttggtcactaggtggcagtataagcccaggtttgtgctacagacttaaagccataaaaaggagcttggttggtcatatttttacaaatacaaatatttgtagtaccttggatgactttagatggatgcagtcctctgcagtgatctatactatagtttatatgtaactccaattaaaggcatttcaaatcagactggattagcatggatacatttttgggctgttagctccgttctattttgtttacatatgtttcttttttcactcttagggaaactcattccaacagtcccacagcttcttgtcagaggtcctcgataaatattaaaaggttgaattgaaacacagcaagttgtaacacatcacacacatgtatacatatatacatgtatacagcaaccatatgctagctcatagcacatggtagcccgcaaccctctataatggcatctgattctctctttcattgtccatgaagacagagaacacatatagattgagtaaataaacaagtaaataaatgatctttatacacatacctctagggaaaacaatatgaatatagctctcataaattctcaaaaacaaatttaaaaataaaaaaagaacttaaccacatagaattatactagaaataaaagcaaaaagatatagggaaaattcacaaatgcatcgaaatacaatttgcctaaacatccaaagaatgaaagaagggaaattataaaatatgaagatggataaaagcatctcaaagtagcagcagaccagaagttgtagcatggagtaatagttgtaataggaaatttatacttgtaaatactgacataaaagaaacattaaaaagacagttaaaaaaaatgggtgctgtaaatctgaccaagaacccacaacttggacactcaaagacccttggggtgatagtggtggaccatccattattattttgcttatcagacacatcgtctaactcctctctaaatacagacctccaacgggagaggctggctcagtggttgagagcactggctgcttgctcttccagagcacctgaatgcaattcctagcaaccacatggtggctcaaagcacatggtggcccacaaccatctacaatgggatctaatttcctctttcattgtccatgaagacagagaacacatatacattaagtaaataaagaaacgaacaaataaatgatcttttaaatgaatacttctagacccatggattagggtagctctcagacctccccagagacacttctttgtgtagtgaccagggctttgatgtggtcaaaatggagagaatagtatctgtagagtgtgaagggtgctcagttctaaatggagcatctatatcacacagttacatgcaaacctcagagaaaatcacttaagacaggggccatctgggctgggggttaagcagcagtgacaggaccggtgctcaggagctcacagcagctgtgattccaatactaggggaggtactcgatctaccgctgaggagccattgggagttaatggtgtggccctctgatagatccatcaacctgcaatggatgaccccatctccatgcatatatggttggttggcacaaacgggacccagtgtgttattaaaaaacaaaaacaccattaaaaaaaccaccacaccaggccaaagccatcatttttagcatcacaaaaaaaattgaataaaatgaacaatttcttcgactctatcagggaaataacattccccaaattacaaagtctcttagagagagcagcgacttgctgatgagtgagaaaacagctcctgtccacagacagtgtgaacacaggaaaacaaactgacgctttcttggaaggtttgtttgaataaatttaataataagataatccaggctatatccagcgagcaatacacttttgtgacttttcttcataggagccctagagcatgttttttagtgaaaatgatctccatagggattggaacagaaagagaaaaggaagcattctgaaacacccccatagcagtctgctctcctagcttcagcctcagacaaacgtgactcattagaaattcaagtaactgagtcccttaatccccaggctgacatgcaactcctgagctcgaacattgccccaccttagctttcataagactcaaaccgacctgaagggagggaaaaaaaagcccaattctagcccaccacgcttctgcttaaccgacgggaaggaaaactgtacaagacccaagaagaatcgctgtgatgaccacagttgagtggcatagatacagctaatgaacaccctgccaccatcaaggcctcctgtaatatcagagaaatacaataacgtgtcatacaactcagaactaattcaagaagtctctagagcaaccaaagcaacaaattaggaaaaataaagacacttggaacattctccaacctgggatccctctggctgtatcaaacagtggacacatggtatagccctcattttcaaccacatcaaacactgtatgtaaagcttactaaaacaaaaaaatctcagctagaaaatacagatcagaaccaaattcaggcgtggtagacatctgcaaggattagatggtacatctaattatgattaacatggtaaaagtgctaaaacaaaacaaaacggtagactggttttgacccccggacaagggacagaagtgcttattttacatatcaatgcagacctggcttccaggttctactagcagcgttcagtccctgcctgatataccttgttcccaaccttgaactttccagttcaggggcttagctgcccttccacaagacgttctttccaatgttatctagacattttgcgccccacccttctcctctctgcacgagcgcaccccttcttcccttttctcctctcccctctccccatggcaactcctcaatccttgaagccagtgaactccccgagagcagttccccaataagcctacctttaatgcaatcggacttgaatagtctcgtttcacgggcagagaagtcattgatcggagacaacatgcatgaataggagaccaacaccatcaacacaaccgatgctcaaaatcaatagcattaagaagtgagcattcataaagatttggaagctaacacttcagagcacactccagaagaacaaatggggtgtgaggggaagggatttagttagggattttgcttgtcattggcggtgcatctctgcaatcccccaaatctggaaggctgaggaggatcagaagctcaaaggctgcctggaatgcgtggggagaatctccctctaccaataaagagacaaacaatgccagacaagcagaatgtatcaggagacaactggaaatgggataaagatacaagataatacctaaaacctaatggaatgaatgaagctaaagccgcacaaaggtgtgtgtattggggggtggggggagttacagatgcgcattcctaaggaaggaatctctgagtcaccaccacctgcaggaaaaccttggcagaaaacagaaatgacaaaggctcgagcgtaaatacaaaattttaaaatgctgtttttcttgaaaaaaaattttttttaagaagctgatgaaactaagctacaccaataacaaactcaaatcacgtttgcaaaaggagaccttacaatcagtcaatgcttaaaatctctcaagagccgaagcagaagggatgctatctaactcaattcatgatgccagagtgatcctgatatcaaagccagaaagagacacaaaagaaagttaaaaatttatagcccacatccctgatgatcatcatcattacaatatccataacccgagtttgatggaattaaaatatccaggtgggatttactcatggaatgcaagaatgattcaacatacaaaaatcaatgaacacgatatcaccacaatacaatgacgatcatcttgatagcattaaaacaaaaacaaacaaacaaacaaacaaacaaacaaaaaaacccacggggctggggagatggctcagcggttaagagcaccaactgctcttctgaaggtcgtgagttcaaatcccagcaaccacatggtggctcacaaccatccataatgagatctgatgccttcttctggtgcatctgaagacagctacagtgtacttacatataacaaataaataaattaaaaaaaaaacacttggaaaaactcagtgtactcatgattaaaaactctcggtaaaccaggaataggaggaaattgtctgagtacataagggccacattgaaaaagcccacagctaacatggtcaatggtgaaaaattgagtgctttccctttaataagatgaaggaaccaagaatgtttgctctcttagattccaatcctaatagaattgatggtcctgtgcagaacagttggggaagaaaaggaatccagggctgggactgtaccacagtctgtagaatgcttttctctagaatgcataaagccctatgtgcaatcccaatagtggtacaagcctatgaccctgatactcaggacgtagaagctagaggatcacaattcaacgttaccctgggctaaagaccctgttttactttattactttttttttttttaatatctgaattgtaactgactggagtactctgctcacaaatgccatgattatttatgtgggggacttacgaaagtctacacacacatacacacacacacacacacacatacacacacaccatacaactcaggtaattcagctgtaaagttataggatacaaaatgagtatataaaagtgaattgagggccactgagatggctgagcaattacaaacacttgcccccaagtttgaagacctgagtttttgtttgatacagccctggctggcttggaaattactatgtagaccaggctggctaccaatttatttaagatctgtctgcctctgcctttgagtcctgggattaaaggtgcaagccactacagcaaacttggtgttatagtttaaatatatggtttactcctagcaacttgtatgttgtcttggtgctgaaatgtggtggcatctttaagagggtttaattaatttctcaagagcctagctgagttcttggattttaagaagaggttgctataaaatgatcctagcatctacctgatagctcttgtgcatatattatactggacaaaatagatgtttccctaccacaactctcctatgagttaacactgcttccaaccagaaactgagaaaatcctggccagcacagtcttgaatgtctctgtttccagaattgtgacctaaatttatctttactattcatgacttaatctaggttgaggaatgttgctataacaaaaaataatctgagataattgctctgactagaacatttaatattgttaaaatactacttctgttcaaagtgatctgtagagtcaatcaatatctatcgcactcccaatgggtttttgtttgttttctttttgtattttggaagtagcaaaaataactataaaatacatatagatgcgtgaagacccatgaacagccaaaataatcctgaaaaagaacagctcttgtccaatggaccttgggggaaaccaaacgtcacattttacacagagcaggataaggtattggttttcattttgcctctccagaacacaaaacctagatttttttgtttgtttgttcatctgttttaatagggcctcatctttagcctgggcttaccttgaatttggagtctgcctccctcagttgctatagttctgggattataggcataaggtgcaatttccagcaaaaatcctttaagggctgcttgaaactcactatgtagctcagcctggcctcaaactcataaccatcctctcaagtgctaggattacatgaatgagccacagtagcagctaaaaccctttacattttattagggtatattctatacaatatgagtgccattataacatcacatacacgtaagattttgttcctattcactcccattactctctttttttctccctctcacttttactgatccccttactctgctcacacacttctgatttctggtttcttctatagcatggatgaagggttatttacaggaacatggcagattcttaccgaagaaagtatccccccctcccaactccctcagcaaacaataactactaataccccttctgcagggaggaatgaggcatcttggtcccttacgtctagacactgttaactgcctcctcggggagggatgaggccttgtgagcctcttgtagcaactgttaacttcctacacatcctaaggaatgtgggggtccccttgtatacacaggccttgggtagggtaatcataggtgctgtgagtttatgagtatgactgctgctgtatgttccacaataccccatcccttcttccagctttacctttctgccctctttgctgtggtgtttcttgaaccttgcaagggaggagatgcagatcccattagggctgatcttcaacaatcacacaatcacatattcttttttgtttgtttgtttgtttgtttgtttttttgagatagggtttctctgtgtagctctggctgtcctggaactcactctgtagaccaggctggcctcgaactcagaaatctgcctgcctctgcctcccgagtgctgggattaaaggcacgcccagccaatcacatattcttatgactcagagctaaaagtctgcacgaacagaaactagtcttaccaaagctgacagtagcacaaatctacaggtataaacatacatggttagaagacaatttgatagtcataaggtggccagctagggaggcaatagtggtaaagcttctccattagagcctatggtctccccagctagaggcttttgacaaggcatgaactttctcctagcaagtgagcctcaactccaatcagaaagttaattagccaaataaaaaaaatggtaccctgtgctcagcttggcctgtgagtaaatctgtgggacattttctcggttaacgatcgactgggggggggggcagtccacttaaaccatgtgggtggagccacccatggacaggtggtcctgggaggtatgaaaaagcaaagtgagcaagccatggggagcaagccaggaagctgtcctttgtggttcctgccctaatttctactgtgatgtggaagtacaagccagataaatcctttcctacccaatgtatttttggttagaatgttttatcacagtaatagaaagcaaactaaaaactaaaacatctttctaactttcatgccacagtttctttttcttcctttcttttttcttttctttcttttcttttcttttttttttttttttttttggtttttcgagacagggtttctctgtatagccctggctgtcctggaactcactctgtagaccaggctggcctcgaactcagaaatccacctgcctctgcctcccaagtgctgggattaaaggcatgcgccaccactgcccggctgcatttttttttttaaattaaaaaagttgaacctaggtgtgttgtctcgtgcctgtaatgcccatgttcaggagagagagagagggagggcagggtgattactatgacttcaacatcagcatgcgcttacatcatcagttagaggccagtctgggatacagagtgagaacctgtctcaaaacaaaaacaaaaaaacaaaaaacaaaacaaaacatcaactatcataagtgacttaaataatggatattaaacctaaatatcacacaacttcacttaagaaaattctgaggactggaaagatggctcaatgattcaaagtgctttccggaggaagcctgaacaccacagtttgagtcctaacacttttatataataagctaagtgtgggcccatgcatccctataagtccagcactgaggctagcagagactggaggattaacaaggcaaacaggcagacacggtaacagcctcttcatgcatgcactagctcacacacatgagtgcgcgtacatcacaaacacaagcacacacaataaatacatttaaaagttttcttctttctttgtaagtgtgaaaattacaaattgtagaattttgatccagataagaggatcaggagtttgaggctagcctgggctacataagaccctgtttcaaaaaccaaactaaaccaaaacacacacacacacacaaagttgacacaaattttcaccatgtattcgacgtgtcaaggctcacctgggtcatgcaagactaaataaattaattgtaactaaatgcaagactaaatgtctaaagtatttttgaaagtctggcttaatgcaatttgcttcggtgttttgtcagatgacaagttagataggtcattccatgcttgtttacgaacaagacaagtaaaatttctcgagtctctgtctcttggaataggtctttccactgtaggtgggagggaaatgtttccgtctcccaagtgctggaatttaaaggtgtgggtctggttgaactcgttttttgtgtccttcagtggtcaggtgccccggctggtgggtggggtgggaggaggagtatctgtctctattgttcctggactgatcctgaagtgtaacggaagtgaaaggaaggttgagtggagggctagtggacagtgactggcccacaacactacctttaagaagacaaatggaccatagtgatgtacacctataatcctagcacccaagaggcagaggcaggaggatcactgagttcaaaaccgtcctgatctacagagagagagagttcaaggacaaccagggctatacagagaaaccctgtctctgggggggaaaaaaagcaaggaaaaaaggaaggaaggaaagaaagaaagaaatgaagagaaagaaaaaagactaataggtcccagagactcccatgacagtgggaaagaagagtctgcacacttcctcctgctggaattcttgataagaaataacctccagagaaatggcaatcatttacaatttataccacaaattatactacactggaacaccatagtaggccttaggagaaaaacagacgcttaaacatccctacttggaggctttttgaaaacaaagtaaattatctttactgagcaagaaaacacttggtgtctaggtaaccctgtagcatgtgtgaaacaaaagactattgcccagacagagcctcaactttctcctttctattaaattcacagtaaaaagcaaacatgtatagacataagtaataaagtcaggtgtaggcataaatcaccgcatcttttctacaaaagtgagcttaagcgttttacctttttaggacagagtgaaaatccggaagttgtcttctgattgttacatgctgccacggtcctccctgtcactgctgccattgggctatggcctggtgtctgtactcaaactgaaaacttgcaagctagcacacgtgctggcggagtgtggacgcacgggtacacgtgcgcacgcatgaacacacacacatgcacacacgcgtgcgcacagacacacacacacacacacacacacacacacacacacacacacacacacacattttgcgcatgcgtacagatatgtgcgtgcgcacacacatacaggcacacgcacacatgcaagcgaataaaattaaaatatggtaggcgcatggtagaacatgcctttgatcccagcatttggaggcagaagcaggcagaactctgaatttaaatccaatctggtctaaaatatgagttccagttcatccaggaccacgacaaaaagaccctgtctcaaaaacacaaatcacaaaatggcaaaatgaaacaaaacaaaatgaaaaccaaataaaatagaaataagaattctaccttcagctgagtgtgtgtttgtgttatatatgaatattgtgatgaatatctgtaatcccagaactgaggactttgagacagaagaattaggagtttgaagccagcctggaaaagatggccagattatgactgtttttctaaataataagtaaagaaataaagaaaaggagaataacaaccaagcatggtgataaattcgtgacctcatcttctatgtatatgatgtaaaagtcatgaagtaataacctcttacaatattcaagtagtagctttacttggaaagaaagattttaaaagaaattttattttttagacagtcaaaaatataattaagaagtatcgtatctgtgctaagcagacaatataaaattcgggaacaaagaacatatatctttatctgtttgcttatttttatttatttatttatttacttacttacttacttacttacctacttattggagacacatttttttctatgtaacagccctcactattctggaactctccctgtagaccaggctggcctcgaactcacagagatttgcctgcctctgcctcccaagtgctgggattgaaggcctgtgccatcactgcctggcactttttctttctgtctctgtctctgtctctgtctgtatctcttccttcctttctgtctctttcttttttatctttagtatttttaaaggcatgtttttatctgctagctatttatttttgaggtagagtctcacgatacagcctcaactagcctggaactcagaaagagccatcttcctccccccaccacacctggcaggttccttttaaagacattacttctcaactcaaataatgctaaaatcaattgagctgtttatcatctgactattgttggttagctagaaacttctgaagtgttgcaatgtttagctaaagtctagaatttgctgtttttccatgtgttaagtgtcaggaaatgcgaggtaggtaagtgtttgaagatagtgtctgccattatacaaaatgctgagtgataggctgattgagtgtacaaccaaacagatccagatagtcaccaacttatttattagttgctggactggtttttaccaaactatgaggaaaagtaggagggataaaaaagagtaatagaggggtgaatatgcaattatgttatatgcattatggaaatagttaatgaaatctttactttgtacaaatagtatacactaattaaaaagatacaaatagctgatatgcaagataaataagttttacagatctaatgtatacatagcacaggcactacagttaatgatactgtgttagatcctttttaaagaaaactctagttttgctgagcgtggtggcacacgcctttaatcccagcacttgggaggcagaggcaggcagatttctgagttcgaggccagcctggtctacaaagtgagttccaggacagccagggctacacagagaaaccctgtctcgaaaaaacaaaacaaaacaaagagtactgactgctcttctagaggtcctgagtccaattcccagcacctacatggtggcttacaaccatctataattccagttcttaggggacattgacaccttcttctggcttctgtggacactgcacagatatggtacctaggtatggcagccaaaacacccaagcacataaaataaagataaataaatatttttaaaaagggggatgggggtggacagatggctcagcggttaagagcattgactgctcttccagaggacctgaattcaattcccagcaaccacacaaccatctgtaatgggatctaatgccttcttctggtgtgtctgaagacagctacagtgtactcaggaaaaaaatagtttttttttttttaagaaagaaattcagatatctgctgtattgtactctttattactgccaggacaaaatgtccagaacgataattcaaaaatagcccactgacttttcacgtgctagaaggtagaaagtgatagcagatttcatgccatgcagatgatccctgtttccacagaggtgcttctctcacaagacagaagaaatggaagagcaaaagacacaaccaggagtgtacttttagctgttcttacaaggacagggacagtaatcgagtcatggaggcattaccaaatacatccaaaaaggccttatctttcttgttgtttttgttcggttggttttggttttgaggcaaggtttttcggtgtagttctggctatcctggaattctggagtcaggctgacctcgaactcacaaagatcctcctgactctacctcctgagtggtaggacaaaagccgtgcaccatctgatcaccctactcatgatgtgtgcatgcacacacactaataataacaagcaaaaaatatctttaaaaagtctaaaaccacaactttgagacagacattaggtagacatacttattccaaaagtcagaaataggaaagaagaaagggataaattacgccaaataagccccagacatggcagggcaagagttcgttctgtgtgcgcacgtgctccaaagtgtttcattacagttgctttcagagtcctgggtgaggggattatttgtaggagaatggactccctacaagtagttacacactcagatcttctctccctttctcaccaactatagaccccccagggaggggtggggtaacatcagctcctcccaataggggaaggttttgttggtgttgtgttgtgttgtgttgtgttgtgttgtttgagacagtctatcactatgtagcctgattggcctggaattcatcaggtagaccaggctggcatctaaatcagagattcacctgcctctgtattttgactgctgggattaaaggtatgtacaccaacatattcccctaagaggggatggatcccagggtctagatgccattgctctctctcccctctctctttataaatatagttttaagatttttacttgtatttatcagtacagggggtgggttgctggagtatgccagaagagagtattggatcgcttggagctagagttacagggaattttgagacatctggggactgaatataagtcccctgaggagcagcaccccaacatggtaatacttcatcttaaggctcaagagcaaactttggctccaagttctgcctctagacacacggagcgccatttgggttcacagggctctaagcttgcctcgctaggcacgctgacacagcacttcttgtcagtcggaaccagttgctggcacctctcccaagctgtttttgcatactggtggctctatagctctggcgtcataactgagagcagtgttttcatagctcttttgggcattgctctcattgggggtctattctctgggcaaaagtcgctaagcactgtgctggtagagactttatatcagccttcctctggttctctgcttggctctcaaaactcatggaggaatcctttgaaatctaggtgaagctagtcatgactccacagctcatacgtttggaggcagcagttccttgctaaattctactttgtgtgcattaatgtctcctaagcaagtctagtagaaaatcctttataatatcaattgtagtacttcaagtttcttccgcatcacggcatcggctgagtaacagtcccccagatagatggaacaatagaagattacaaagtgagaaaaggaaggaagtagaaaaactggtgtttacttggttccagctgttttctgattcaggaagaaaggggccgggcatactctacccatttatagtaagaagatttttttgttttggtgggtttttcgagacagggtttctctgtgtatccctggctgtcctggaactcactttgtagaccaggctggcctcgaactcagaaatctgcctgcctctgcctcccgagtgctgggattaaaggcatgcgccaccatgccaccacgcccggcttgtagtaaggagatttaactgtaccatgtaaggcaagagctcctcatgtcagagttcaaaaagtaaatgtgctgaaccatcacttggtttagaacagcttaagcccccagcccccactccaccccaaaccaacccttgactgtttaattgctgataaggaataaaagccctttcctataaaccactgtttgtttgtttgcaacgaaatcagagatttactatatggatatttaaaaattcagaatttgggggctagagagatggcttagaggttaagagcactggctgctcttccagaggtccagagaacccagtttcaattaccaacaaccacatacagatcacagctgtctgtaacttcagctctaagggatcctataccatcacacagatatggatgcaggcaaaaaagcatcaatgcacatggaataaaaataaataaaatttttaaaatttggaatttacaaataatgaagatccctcactggttcagccactcaccgaggtacctcactccagcaatttcccctcaccagacttattcatttttaaagtttagatgtttgaatatttattgtaaaacagcaagcacaatgatttctatttttataattggtgacgtgatctggaaaaatacttctaattggtaaggcaagagtgattgcaatgcactcttcatttttttctaacttcttaaagtatcttcttttttaaaattaaaactttattataggggctggagagatggctcagtggttaagagcactgactgctcttccagaggtcctgagttcaattcccaggaacctcatagtggctcacaaccatctgtaatgagatctgatgccctcttctggtgtgtctgaagacagctacagtgtacttagatataataaataaatctttaaaaaaaacctttactggaaggagttacagagacaaagtttggagctgatacaaaaggatggaacatctagagactgccatatccagggatccatcccataatcagcctccaaacgctgacaccattgcatacactagcaagattttgctagaaggaccctgatatagctgtctctagtgagacttcgcctgggcctagcaaacatataagtggatgctcacagtcagctattggatggatcacagggcctccaatggaggagctaaagaaagtacccaaggagctaaagggatctgcaaccctataggtggaacaacaatatgaactaaccagtaccccccagagctcgtgactctagctgcatatgtatcaaaagatggcctagtcggccatcactggaaagagaggcccattggacatgcaaactttatatgccccagtacaggggaacgccagggccaaaaagtgggagtggggggaagggtatgggggactttttggatagcattggaaatgtaaatgaggaaaatacctaattaaaaaaaaaaacggggcctagcaaacacagaagtggatgatcacagttagctattggatgggtcacacggcccccaatggaggagctagagaaattacccaaggagctaaagggaactgcaaccctatagatggaacaacattatgaactaaccactaccccggagctcttgactctagctgcatatgtatcaaaagatggcctagtcggccatcactgcaaagagaggcccattggacttgcaaactgtatatgccccagtacaggggaaccccagggccaaaacgggggagtgggtgggtagtggattggggggggtgggtatggcggacttttgggatagcattgaaaataaaaaaaaacctttactataaaaaaacttgcaaataaaaaattacccaccggagctaatgaccagatctttaatagttttgttttttatattgttatagtgtttgtgttctcagcacacttaacaaaagcaacagaaaatataagaaattaatctactcaactaaactaattaaagtttattttgagacaggatctcactatgtagtcctgaactggaactcactatgagcagctggcttttaatttaaagacccacaggtttttgcctcttttgcctctggagtgctgggattaaaggcatgagccagcagcatcccagactacattttaagaaagggaaaaaagctggtcgccgggcatggtggcgcacgcctttaatcccagcactcgggaggcagaggcaggtgaatttctgagttcgaggccagcctggtctacaaagtgagttccaggacagccagggctacacagagaagccttgtctctaaaaaccaactaaccaaccaaaccaaaaccaaaccaaaccaaaaaggaaaggaaaggaaaaaacgaggtaattagcataattagcatgacaaggaaggggtagtgagaaacagtgacacagaaacgcaaaggtttcaagcagaatttattggaagtttggcaagcaacaaacaccctagttggcctgtagatgactttagattgttttgcggtgattttcattttgaagaaggatttccaattttcaaaacagccaggctcaaattaagtattttccatttattttagcagtttggtatagatttgttttcggcttagtgtgtagagatgtttgtttgtttgtttgtttgtctgttttccatcaggacttcatttatgcatgagggcacaatggtagctgatggtgacacgtttctgcctgcctgcttaatcagttgggttcatggcaccatctgtggaagaaaggttttcaattattctctatttttcagtaatgcctccctcgtgaacatctttagaaaaggggccttccaaggtctaccaagtcttatcgattctctctctgtgttttgttgtttgggaggtttttctgtgtaatggccctggccgtcctggaacctcctttgtagaccaggcagactttgaactcagagagatctgcctgcctctatctcctgagcactggcattaaaggtgtgtgctaccgccatccagctgattgcttatattaaagggcaaacatcagtgtttcagctatattagatgcctacgtgaaaaggcagtatggggctggagatgcagctggttaagttgcatgctgtcaaacctgtgagggtgcatacgtgtaagagtacttgccaatacaagcaatgctaaacagttaaatgtctgtttccttctttacctatggatgttgtcattggtttgctttgtaaactatagttttgacgctgtgaaagacagaaggcactacagaaactacaaaatccttttcctttgtgtgaaatgtgaaagttttaagaaaacttataaagaaattgcactgatttgattactaaacgtcagttctacttaatgccaagcttagccaataactatttacctcacttctttccaggaaaatgttcatggtattttattattattttaaaaattatatgtctctgtgtcacatgagtgctatatctgcccagctcttgagctgtttaaggtttactgtaaatgataaaagttgtatgttgggctagagagatggctcagtagttaagagcactgactgctcttccaaaggtcctgagttcaaatcccagcaaccacatggtggcttgcaaccacccgtaatgagatctgacgcccttttctggtgcatctgaagacagctatagtatacttagatataataataaataaatctttttaaaaacagttgtgtgtcttttatttaatttatacaagtgctagtgcctacaggggtgataggaattgggtctcctggagatgaaattataggtgattgtgagcagcttgacacaggtgctggggatcaagcttgggtcctcctctgtaagagcaatatgagcttttaactactgagccacatggttttagttctttataggagacactgttttttgttgttgttgttgttcttgtttttccccctccgttctgccaagtcctggagagtgttcgagaccgtgggtctattctatattctcagagctcaattgttctggaaagtcagagcctaagaggtaggatctcagaagtaggactggctgtggattggctgctcagctcttccctagcttctactccttcactgtgattgtagcttcagggattctggctccaggggcagcagtacagtttagtgcgatctgaacattaggaccctataaacttgtactgcttcagatcctcccagttccttcaaggtctcatttcttttttttcttgataactattactcacaatctggttcctacaggtgaaaaccttatctactccccagggatctcagctgaaccagcctgctggggctcctccttggccagattcaagagccttggacttggtttgttaacaaaggggagaggaggggctgcttatctggggatgtctgagtgggaaaggacaccagggacagtccttgagctagagtcctcccttgtggccaaagtacagtgtaatctgtgggaacagtgaccatttgtgtctcttccttacccttgatgttctttgattgcctagaccatcctcggaatgggatagggtgccttctgtctcctggatactgggattgcatcatactcggcttttgtagtactaaggactctaaccaaggacctcattcatgcaaggcaagtactataactagtgagctacatcctgattatccctccattgtcttatttattatttggttagttatttatttggtagggtctcactatttagccctagcttgcctagaacttgttatgtagaccatgttggccttgaagtcacagatacttgtcagttgcctctctgagtgctggagtgctaggcttaaaggtgtgtaccctagacctggcttccagtgcctttaaattccctgtatgtatgtcaggctgcaaggatgaaatgtgtgacttcaataacaatccaaagggcaagaaagatacctgattcagtttcttccaggtcttggtcagcttgtgggttctgatcagtgaacatctccctagaatatatagtgtaatcaattgtcaataggctaaatccaacaacttagagagacatgaaaatcattcatgcacacacatgaaaatatgacccatttatatttgaactaagacaggctatctacccccaccttctttgagacaggctcttactatatagtcctaaccagcctagaagccactatgtaaatcatgctctacgtagctctcaaaaagaaatctggaagtggcaatgtggtgaggtagagacggtgatggagagctcaaggccagcctttatcccaccagcagtctgggaggcagaggcaaatggaagctactatgtggagcaagttggcctagaactcctgcttctgcctcccaagtgctagaatgaaaggtgtgcactatcttacctgactatttttccattttaaaggaaaaaagacatcaaatgtgagcctccccctgccagagcctgacaaatacagagatggatgcttgaagccaactattggactaagcacagggtccccaatggaggagctaaagaaaggactgaagaagttgaaggggtttgcaaccccacaggaagaacaatatgaaccaaccccaagagctcccagggactaagtcatcaacaaagagtacacatggctccagctgcatacattgcagaggatggccttgtcatgcatcaatgggaggaggggcgcttggtcctatgaaagcttgatagatgccccagtgtaggggaattgagggtgggaaggtgggagtgggtgggtgggtgggtggaggaacatcctcatagaagcaggggagggaggatgggataaagggtttcgggggggagatgtggaaaggggatataacatttgaaatgtaaataaagaaaatatccaataaaaggaaaaaggaaaaaaaagaagaaaaaatgtaagcctccactagcacatgacaaatgacagtactgaaaggacagagcatgaaagttcttctctaggacattgcttgtactcaagagcagtcacatgaatacaaatagacttagggtctcttttactctttgaactctctgacttcctacaaaaatgagagccaggcccacaaaaacaaaatcctacataatttcataccaaaatcatctgtgagaaaaggtacacacaaaacagagtagacaaaaacaatctatcccataaaggaacagcagcatattgcaactgatgtgtggaactacagaccagatcactacaacactatgtcattacagacttcatcatcttcctacgttgcttctcaactgataccaaggataagactaagcacagttaatggataaccaactcctattgtatttctcctccctggatttcccataacccaagaacaattgagaatacatacatatacatggaggggcttgctttaatgttgccagtgatgactttcacattattgtctatgtctctgtcactgtgactggtttcatcatcttcagtacatccctatggagtgataaagacacaggggaaagtcaaaattgaagtagataatttttggctgtcaaaggaggacttttgtcttaatgttaaccctagagttgatagtcttaactgatgagaataaagttgggacaaagcttagtaaacagttgtaccttatggactactgcttctctcccacatcaagatcattagtgtagataccttgataagttttgagaaaatgggccttgggtacagtgttcttataatggtagattgctcacattaatgaaagcaccagataccctgaagaagtttgacttggttctagaatattttagtggctttggttgctgactataatcctcaattggcttttattactgctcacatttattttctttctttcaaaatcccaaaaggaaatctgaatgtggcagtacacatctgcagtcccagtactgatgaggtagaggcaggactgagggctcgaagcccagtttttaatcccaccagccctcaggaggcagaggcaaccagatctctgtgagtttgagggccagcctagtctacagagtgagttgtacagtgagaccttgtttcagaaataaataaggaaagaaggaggagtggagaggattatatctgtctaggtctcattcaccttagctccccagggctagtgtcctggcttcagggtaggcaaatagcagctacttggaaagaatctttactttggaagtaaatcctcaattttcatgtattctatattagcaaatttgcaaatattttaattgccttttggtcatttcagacacgcacagagaggtgaacaatttgtcacctggtttcagctctcaaactttaagcacacatcctctacattgttcatctaatatcacaatttccacatttacattccttttgctggcaacctccaccccaaggcatagtgctaaaactctatgcggtgtgtctaagcacacaaggctgtattgatgctgtgtcttgttcaaattttaaagtgtgtgtgtgtgtgtgtgtgtgtgtgtaagagagagagaaagagggagagggacagagagagagagagagagagagagagagagattggctctcaccttctaccttctctgggacagggtaagtcttatttctgccatgctgcgtagttcaggctaactggcctacaaccttccagaccattctgtctctgcctctcacctcaccatagacattctaggatcacacattcaaggcaccacatctggcttttaaaaacactttttatgggctaaaataccttttcacagacacacactttagaaaatgatactaaaaatacacagtgcgccagaagctgaatgacacacaataaggtagaactgtcaccgctctttctgtatactgtgcttcaataattcggccaagaataaacttgctacgtgtgcagttacactttagtttattcatggtatatactaccaaggaaaattttgggggtatataattaaacacattatcagtttgtttggatttttaaaaagctcttctcgcatacataacattctgactgcatttcccctccttccagtcctcctagttctccacccccagcccagccccatgagctcccctctcccccagatttgtttggaaacttttaaagtgaggctttcgaaaatggatgcactatgggctggagagttagcagagcacttagtagttctcactgctattccagaaggcctgagcttaatttccatcacccacattgtacaactagctcacaagctctttttgtttttgttttttgtttgtttgtttctgtttttgtttttttgagacagggtttctctgtgtagccctggctgtcctggaactcactctgtagaccaggctggcctcgaactcagaaatctgcctgcctctgcctcccgagtgctgggattaaaggcatgcgccaccacacccagctgctcacaagctcttataactcctaactataggggatcttctgggaaacaattgaccatcaattaaatacaatcttagcgtgattcagttttcagtggacatcattatcattatcattatcattatcattatcattatcattatcattatcattatcctagtaccatatctattgcatcatgtttagagcttatccacccttgacatttgtgttttttcagagtcccatcttggtgtgtttctgtcttccttggaccacttacagcttggcaagtgtcctcatcatcggtactgctgactctgtcctcctgaagaatatcttgcaggtgaagaaattcggcagcgctagagaaaaatgtcataataataaatacactggagagtcatttatctcaatgacagactacatgcaattcagaaaccgacatactaatctgttgcttaaagtaaaatcaggggccaaataaatgattgaataactatgatttacttcagaaaaatgccttgaacaaaatctaaaagctgaagcgtgtcacctagagtaaccttttcattgtatagattaaagaactgaaatagtgaggtgaatctgttttttgactataactttgttgcacttctactggcttacttgatatatgtattttgttccccaaacactttccttttaaaagcttcagttttggaattttatcaagtttgttcttgttttttgtttgtttgtttggtttttggtttttcgagacagggtttctctgtatggtcttggctgtcctggaactcactttgtagaccaggctggcctcgaactcagaaatccgcctgtctctgcctcccaagtgctgggattaaaggcgtgcgccaccacgcccggtttgttttttgttcaggtcacaatcaccagcctaattttgattcccaatattcttttttttttttttttttttttttggagacagggtttctctgtatagccctggctgtcctggaactcactttgtagaccaggctggtctcgaactcagaaatctgcctgcctctgcctcctgagtgctgggattaaaggcatgcaccaccatcacccggcgattcccaatatttttaacagaaacagatttgttcctaacagtagtccctaaatgatttaactatattgcaatttgggccctggatcatccacagtggagaatgtgtgcttttcaaggcagtctagaccaagattctacaagtaggtgtggctgtgcttgtgttcctaccctctgttttcatgaaacaaataggctacattttctcctagagtttctgggagttccattatcagttctctgggacactgtgcctcattcactagtcttagcaactagaatgcttctggccttgggaacatcccccatgaaaactgagtacaaaagagaaattgatatctaccatgttcataacaagggtttcagaacactgtgggaaataaaagtccaaagaaaattttttagtcttactgcagtaacacttttttaaaaaactcacagcaacttaccagtttcaatccacaagaagactaaaggctcttttctttttttggggggggggagcgtcatagattcccggctactgctctaggatgtctcatggaagtgtacatttctgtgctgagcatcaaattgtgtggcaaggtcatgcaagatgtatttcttgttcacttgggtggaaatcagctgctgacaccaaaggtgaccattgctgatgtgaagaaagtgttgcacaacttacctcagtggctcatctgcctgatcgtcggtgtcatcatctgtgatcatgaaaaatcaaatgtgaaagtgcagctaggaagcaaagggtggtagaaaggaggggttgggatcaaaggcctcttgagcttaaactgctgggtgcaggagactgctacctgctcaatgatattgttgaagctaaatacaacagagatttttttgtttacaacctgtggaatagttagttggagattggaccctttaaacaagcaagaatataaaaagaaaaaaaaataaaagttgtcgtttactaccttttttagtgttttaaattttgtatttacacataccaaaaaaatagtattttcatttattgttttgactatttgtaagtaaacttggaaaaagatcccttcagcattatttagcactttttcaaacacattaggttcttgaaatgggtgaaggaaaatgagcttaaagggggatgcagaacaaaaaggtacctgagttcctcttcagaccgggcccactccagcactaaaggagagaacccgagctgctgagttcattcccatgaaggcttaactgttgggttttggttttggtttattttttgtttttggtttttaaagacctagactgtcaacacataaataaaaaccaaaatgacaacaacaacagaagcaaaaatatcaaggtgggggttgggggtggggttccaaggtgcaatacttgcccagagcagaggacggcccaggctggaatcccagaactgcgaaagaaacaagagagaataaaaaggcaaactgaggattaaaacatacacagactcaaatgcaaataaaacttgtgtttaatgtgttagaagtcaaagcactttgaaaatatcctcacatgtattccatgttttaggaggtataggagcaagaatatatagattttatgggctgttatggaggaagcttaaacaactttattgatattttgtttgtttggaggtagggtctcactgtatatagccctacctggcctggagttctctatgtagaacaggctagcctcagagttaaagaggtttccatacctatgccttccaaggggctagcattaaatgtatatgctaccatatctagctcactttctgtttcttgttttgttttgtttttctcaatgcagagtttctctgtgtagtcctggctctcttggaactcactctgtagaccaagatggccttgaatttagagatccacctgcctctgcctcctgagtactgagattaagggcacgcacctccactgcccggcttcccgcgtactttcttttatttttttttatatattttttattacatattttcctcaattacatttccaatgctatcccaaaagtcccccataccctcccccccccactcccctacccacccactccccctttttggccctggcgttcccgtgtactggggcatataaagtttgcctgtccaatgggcctctctttccagtgatggccgactaggccatcttttgatacatatgcagctagagtcacgagctctggggggtactggttagttcatattgttgttccacctatagggttgcagatccctttagctccttgggtactttctctagctcctctattgggagccctgaaaatgaatccaacgtatatgttaaatgtcttagtttataagttttttgttgttcttgagtaggtccttcagtttgatttaggagcaataccagataacccacattcgaggagaacgtagaaagaagatggtaactgcaggctcatactggaacattctaatctataaaagacaatcctttccaacagtctaccacctccaggtccacatggttaactaacactgatttaattcattcgcaaccgtctgtgtcattctggttgcctccagttaaagggaatctctggtttagtttgacagctttggagaaaactaaggatcctaggatgatattacttagatatcaagggagaggtggcatgagaaatgaaaaccctggggagacaggagatggtttcccctttgctcctggggaatttgaaagaaacagtgtccctggactcgtgcccagaggagtcactttcctctttccggtaactataaaaaagtaagtaggtttttacctttgaaaagccagttttcttcatcctcgaattctggcaagtccattgcactgcattctgcttcagaggtcttggggctttgcttttcagacatagctccgggattcggcttctgtggagggagaccttgttggtggagctgatacccaagtctaggtgggtgctgtgaataaaggcctgagggcttgggccagagcttcaagtttttatcacagctcgtgctggggtggggtcaagttgagggggcggagtctggagagcctcgggtattgggaatgggtagaaccagagaatgacacacctctgtagtatcctaaatgcctatcttccatggaggtcttagaaaacattgacctctacattttccttcagctagggtaaaagtattaaggaaatctctgtgatctagtgagtattggcatgaaggagtaggtcctgtgtacttctttttactgatcaggtattagatcttccaaccatggagcttgtccttcccaatctacccttccagtttccagcacttgtatagaataggagggtgggtgggatcagcaggcagtggtgtaggaaggggacagtggttgggaaccagtagatgggaggtgagacctagaggtgaggaaatgggccaggagcaggcagggagttctgcagaactgtagtataagagaatgtcattgtactttatacccctatcctctaagggcatggaaaaaaactggagtctgacttttctctctgctggggtggaaaagcttaacagtatctgagcgaaggctgggctgtaggagccattcttatacccttcctttcagtgtgtcagatactgggattcccagagcttgactttatctatcaacaggcacagactgttagttcccagcagtattcaaggagcacagatggtgggggtgggcatgaggctggaaccagcgccatgacaggtggggctcgtggcagaagctatggggttatgtggggtaagatggtgatgggcagagaggtgggacacgaactagaaagtagcacactttggtagtacctaccctaaatgtgcttcctcattagagggcttagaacaaacacactcgctgctaggttgcggctctatgggaagcagcaagaaaatgtctgatctagtttaaagccttggaggtgggctgccctatgttcttcctttggatgcattaaatattgagacctcctaccttacaaagccagcaagaactcactgcacaactggactcgattttccagtggatctgtaatgagcaccagactttcaaacagtccttgtggagtacttaaggtgggggaatgaacgacagggcatggtgcgtggtggtgcacaggtctggggggccagaaagtgaggtggtgtgctggagttggggcagttcgacgttagaagagactgtcacacctttgtggcagcaggctaaaggctcatggctgctctctgagggatgatactagagaacagcgagtggcattgttctttcttcaactaccctagaagcacaagaaatggctgtgctctagagaatgttttcttgacacaaagtctcagtatgtagttctgctggacccaaattcgttatatatatcagattgtccccaactcacagagatccactagcctgcttctggcctcccctagtactgtcattaaaggagtgcactaccacactgtcctttggttgctattttgtgcagccatttctgtgcttttccttatattgggccaggtagtggactgccttatttataaagatagaagacctcactttggagcacgactctctttttcagagaccctgtacagtcctcatttagatttcccagcagtaattatggagcccagaagataggcttagggtcatctgggagaggagtaggggaggttagtatgggggaggttgggagtctaggaagagagaaaatctgatctttgtagtatcataatgttccatccacattggaacacttagaaaatactggctcctagattctctatcatctaggatggatacacaaaacaaatatctgtgatctagttaatgttagggaggagagggactggatcttcgttgggtccggtactagcttggctatcctcccaaacctacaacacagaccactcttctccaagtgtggcgacggtggtggggaggagcacgtcaagtgtgtgtgaaggggccaggtggggggtataggactagagaatgtcaagcctctaaagtatccgaagactcacattggtcggaggaccctgaaaacactgatgtacactctccctcacctagattggaaaagctaagaaaacaggactttttggtcattgttgttggggtgtggagatttgcatctatagtccttcttccactagatcaagtactgggcatctcttctttataaagatcttaaaaccttattggggatattgattgtcttcctaaaacaaacagaactaaaccaaacagaatgaagccaaggcacctaagctaaccttgacttaccttaccatttgattttgaagtagtgcttgagaaacacgaagtgggactagggtgcagtagagggagataggagggtggagctgggggagggggagggtagcacaggggttctagtggggtaagaatagaaaaagtcacatctctgtcacatcctgaaggttcgttgtggttggagagcctagaaaatactggtgtctaagttctctttcagttaggttggaactgtgaagaaaatgtctgggacccagttaatattgaggggttgaattgtccctatgttctcccaatcactgggttttataacagacttctttatgccttctacgggtgccaagacctcacttctgaccctggctttcctttccagggacaggcccagaccgttagatttcctagcactactcatgcagcatataaggtgggctgtgaattgggctggaggtggggatgtggatcaagagggtgcaggtagggatgtatgatgagagaatgacagccttctgtagtaccctaaaggcccagtgaatattctgtcacatcaccactgaaaattgaaaactatgctggtgcctagtctccccccagctaggatgaaaagctaagaaaatgtctgtgatctagttcatggctgtctgtatatgcatacatatacgttggtggggagagatctacctgttccttgctcttcctttcactgggctatggaggtgacccatagtgcctccagttctggtattggtcttcttaagttgaaacagttaccgagatcttactgaagaggttggctcttcctcccaactgactgtacagacctttagatctcccagttgtacttgccaagcccagaaggtttgtccccttggccttctggtatacagaatttgctctttctgacagttaaaaagcaagcaagcaagcatactgagctcgcttacattaacggcttgctccccacaggcatttctttcttttttggggagagggggtgtttccagacagggtttctctgtattagccctggctgtcctggaactcactttgtagaccaggctgtcctggaactcagaaacctgcctgcctctgcctcctgagtgctgggattaaaagtgtgcgccaccatgtccggcccccacaggcatttctgcagtctgttcctaggcagccatttctgcagtccttctgggttctagtttgctttctattgataagcggcttaagaataattttagggtttctagtgtgataaaacagtatgggtggggctggagagattgctcagtggttaagagcactgactgctcttcggaaggtcctgagttcaaatcccagcaaccacatggtggctcaaaaccatctgtaatgagatctgatgccctcttctggagtgtctaaagacagctacagtgtacttacatataataatagtagtaataatgataataggagttaaaaaaaacagtatgggtaacagtgacttgggggagaaatttcatttcagcttacaattctcaagttactctcagggagggaagtcagagtaagactcaaggcaaaaatctggaggcaggaactgaagcagaagccttggaggttgcttactggttgactcccttggtttgctcagcctgctttctgatggaacccaggagcacctggccagggagtcaaggcctactataggatgggccatcttatagcaaaatgggggtggggagtcctacagacttgcctacaggcaatctaatggaggaatttggtcaggtgaggatggctttagcctgttttttttttttttttttttttttttttttggttttttggtttttcgagacagggtttctctgtatagccctggctgtcctggaactcactctgtagaccaggctggcctcgaactcagaaattcacctgcctctgcctcccgagtgctgggattaaaggcatgcgccaccacgcccggctggctttagcctgttaagttaaaaactaaaacacaggagataagggtttttatttcatccctctaagtactttcaaacttccctctgaaacctcacaaaccaggccttcatcgcctgcatttctctcagcctccctacctcccaaggtcttaatggagtggtccattaagcagtgaccactcaacagcttttctagcccaacattccacactctatcacaaccctttccaaaatgcgggcaactctgtcacagcaacgaccatactggtacaagtttctattctagtttgctttctcttgctgtggtaaaatactgaccaaaaccaacttggggaggaaagggtttcttttaccttactgggtatagtccatcatgaagggcagccagggcagaatcttaaggctggagggagcctggatgcaggaagtaaagcagagaccacagagaaatgctgcttactggcttgcctaacttgcttttttgtacaatccagaaccccttgcccagaggtgatatagctcaggggacctcctacctgtcctagaggagcaagcaccatccacaatgaactaggtcctcccacatcaattattaaataagaaaatgccccagagattggcctacaggccaatctgatgggggaattttctcaaccgaggttcccttttcttagatgaccctgctgtgtgtcgggttggctagaaactgcccagtacatgccctccctttagtctttcttgagagctgagtgccttgccccaacatggcctctcactgctgctgctcctcaggaagaaagcttcctgcccccatttccctttagtctcttgttttttatgtttctgtctttgttgaaacagggtttcactatgtagcccttgctggtcaggaacctgctatgtagattaggctggcttcagactcaaagagatccacttcctgcttctgcctcctaaatgcatggattaaagatgtgcaccactatacctggccaaggttcttgtggggaaacacaatgggcacttaccttaatccaggacagtggcaggtgtgaagtggattacggtaccattactgtcttggggtcttgattgtgttcattctccaccaattaaagaattaaaaggcaggaagaagaactcaggcacactagacaacaatatttaacacactttattaaatatatgtgaagaagggcaccatacacacactcacacacacatatgagagagacagacagaggaggtggtggtggagggaggcacacatgaagaaaagaatccctgcagggccgagaagggatttggaaagccaaattcagtttttaaaatctggggctgggaagccgggtgtggtggcacacgcctttgatcccagcacttgggagacagaggcaggcggatttctgagttcgaggcctatttttttgccatctttattactgatctatgtggcctctttgcctatctatctgcctgtcagggaactacccaatttttagtccctaagcactgaccaagccttttagagcccaaagaccacacaacaattgagtttcaaatgcaaaacctttgcctacaggatttagatctatactgctagattttggtttggtttgattgttttgttttgtttctttttt

SEQ ID NO: 2 - DNA, 82845 bp, Homo sapien
caatttgtgatagatgaaaacagtgtattctaatattaggataaaaataatatgaaaggcccggagagatggccctacaggtaaaggcgtatggtacccttgaacacatataaaggtgaaaggagagaactgaccccagacacacagcacagcaatgcacacaaacactaataataacggtagtagtaataataataataataataataataataataataataataataaattaaacatcaaagaatgaaatctataacatttaaagaatattgtcatgaaaatgatggtacagtccacaaaatggggctttaaaaaagtctttgccaactgtacattcgacagaagattaacatcgacaggttctttataaagaaattaaacccttcaaaaccccacaaataattcagccagtaaatgaaactgaacacacacaagtggccaatatctgaaaatatgtccatcaccctaagccatcagggaaatgcaagtttgggagtacatttgagattgtggaaaggagataaagccaacaaggatgtagggaaagggaaacttttattttactggtacagtgactctggaagttggtatggagagtcttgaaacaattcaaagaagaattatcaagtcaggcatatgcgtgcaatcccagcacccaggaaacagaggtaggctgatttttgtgagtttgaggcatatatgtattcaaatgctgtaatgaaacccacttctttgtttgctaattaaaaaataataatttccaagcgacttcatgaatagggaggtagcaaaatgtatttataatattgttatatacgcaataatgtgaatattctgcttttgatactaaatcacagtttgcaaggctgtggtggtttgtgcttagaaggggaaggcaggatcatagaaattctgggagctcaaatttaaggccagccagggatactcaaaaccctgttcaaacaccaccaccagcaccaccactgctgccagcaccagcgccaccatcgacatcacagctgccgccgccaccattaacaccaccaccagaaaaaaagctaatgcatgctaattccatgaattattttattttacatgcaattgtgttaattccttaatacttggaagcaagttgtatgctattaaaaaataataataaactgaggagttgcctaagcaaaacaactcaaagtagaaatactgtataaagaagaacacattaatactctgtaagaaacatcaaagagtagaaaagacattccttgggtaccaaaaacaaagaaatcaaagctactatacggaagccaaggcaagaaatgtggccaaacaaacacaaaggggagtttaaggaggaagggctgcctgcgggaagccaagacatctatccaaaaagaaagtgattattcacagccacaatagcaccacaaaaaagggccttttcttatcactacctctgctgtgtactgaatttatcccagtccaagagatgaaaagatgctacctaccactacatcttgcctttccttagtatcctttttgttcactgacttttatctttttgcctaattacctatttttattagttaataataacaacaggaacaggagagaataattgagaatttcatgattttttaaataattttattcagactatacaattgaaaagtaagaattgcagtggtttttttttctttttctttttttttttttttggtctgttttgtttttagagacaaagttcctctgtttcgtcctggttgttgtggaactcactctttagactaggttggcctagaacttaattagtttaagaccataattacaaaggctttattgtttgtatgcaaagcaagttaggttccttctggatagtttgtggtatatattatcataaaagtttttattttaaacttatatatataaatatatctttaaggataatggtacctaagtattaaaaattcctataaccagtcatggtggagtaattcatcccagcactcagaaggcagagcaacttttcaatgtatagtctgaataaaattattaaaaaaaccatttgattctcaatttctcttgaaattttctcctgttcctggtccttttggcagataaggcatattttagacaaaacagtattattatgaagactagtcatagaacaaaggagttcagaaagacaaggttaaaaagtctatactgagcccgtgaggtggctcagtgagtcagggtgccggccatacaaacctaacagtcagatctgtatctctcacccaaaagctatgaggatgatgcgcaatgagatcggtatttccatgccacctaataacacagtagccatttctcagttgatgcttcaatgaaggaataatttaaattatcaagtttaattatgaattacatttctcttttgtcttcttttgcccctcctggggattgaacctaggacctccttcatgttggtaaaagcactctgccactgaatcacaaacattaacagtgtgtattacagtttgtgatccatgggaggagtgaggaaaatagcaacacagtggctttatggcaggagtgtagtgatagagcacttgcatagtgtgttccatcaacctttgccaggaaaactagtaaaattaaccggagattggaggaagctgattccaaccttgatgggtgatcttggggatgagccaagattttagtagaagaaataacctcagatgtagtgaaaatatcaaaaggtagaattgagaaaggagtctaaagctgttagttaattgttggtgttagagggatggctcagcagataagagcaccggctgtgcaagaagaggtcccaggttaggttctcagcacccacgtggcagctaacaactgcctggaactccagttccaggggatctgacacctttttccagcttctgaaagcataggcacacagatgcacacacacacactcagaaagagagaaacaaacaaataagcaaataaataaataaaaatgaatggatgaggagtttgctttcttatatgaaaaagaacgagtttcttgtgatggcttttaaatgttgtaaagatgctgtaaacactgcttccatccatcacaaagaattgaaaatattacattcacttggtagcacagtagcagtgcttgaaagcactaaatgcaattaaagttcaatcatagcactacggagaaatcaacagatgtagagagtcaacggatgcagcaagctatcttgttttatttcaacaaatttactcagctaccccatcattgagggggcagggatgtcaaaggaggcgccaagtcagaatgtccttcccaatggcacagtatgcatagtctaaggtaatgctttaggccagccacagaaagcaaagggtgttaatggtcctgtagtgagggggatgtgtactgcaagacggccccaagttgattgacattaccaaattgggttaaagggcgctttaaactttgtagtttgggctggtgcgggtgcttaaaaaaaaatcccaaatacattttgagataaagggacagctggaaaattctgcaggacaatgagcatagtgacttctgtggtgagtcactgctcagtggcttctaggccctgggtgcctgggaagctgctgagtgagtccttgcccacagctctctctgtttagggctttgctctctgaaaaggacacactcctcactaatgggacagaaggttttcagcctcttttgctttcagcttcttcgtttaggtaaaaggaacagagggacatattttatagaaaaggtggtgttaggggcgtaggtggcactgagatcattctggccacatcctgctgaattacaactcattattgggtggcagtctctgaatcagaggctggtatctgacttcacacatcagagggatagtgcttgtgtgttgcatggtggtttaggtaaatctggatagcacgtggagtagaaagggacctatggatataaaaatcaaaatggttattaacatggtaacagctcctataagcaagtcgattcaggatgagttctaaaaccatttgttccagaatttgataactacttccagtttttgttttgttttggtttttgttttgttttttttttttttttgttgttgttgttgtttgtttttttttttttggtttttttttttttggtttttcaagatagggtttctctgtatagccctggctgtcctggaactcactttgtagaccaggctggcctcgaactcagaaatccacctgcctctgcctcccgagtgctgggattaaaggcatgtgccaccatgcctggctccaggttttgaaatatggtcagctttgttgctgcaacctaacctagccagaatgacttacagaaaagctctgctgctttcccccaaagaggccaagtccccttttctctggccaagagatttaggcctcttctgttttggaggagtgactcctgccaagaaccctacctgataccagaccctttcttcgtttttacttttaaatacttattttatgcacatgagtgttttgcctgcatgcatgcataagtactgtgcatgagtgtctggtgcttgcacaggccagaagagtgagttgggtcccctagaacttactgcattggagttacaggcagttgttggtgctgggaaccaagattctctgggaaagcaacaagtgctcttaaccaactgcgcaggcccaatcctagattcttgttaaacactgagaaattgcatcaaggatttcctgtatggcttgcgataaggaatagtagtgtacaaagtacatagttcctgtgccaacatctgtcattaaccctaagattataaggaaagagtaggaaataatcacgtgtcttctattccacatgcaaccagtcaaagctctggttattgggagcaacatttatgttgggggctagggaataggtatagcagtggaaagtttcggtctagctgatgaggagacacaggtcaaggggaagaagccctgtttgaacagctggtgaggctaagggagagaaaacggagtaactgggagggtgccgattggggggggggggtttagatcattctaccaaactgaaagggtaagggtgccctcccatcaagtgttgaagtgtgatgctgtgaaagagacagggtaccacaaccttcaggatcaggtctgccacttggtggccttctccaggttagctggcctgcaagcttctgtctgattcttcctttttgttccgcccatctcactggagcaatactgggattatagatgtttcactgtgctccgggggacaaattcgggttgtctgagtagcactgcaagtgtttttactcagtggcccaactctctggtctggacctaggatcttgaactgggaggtctgagctgtctgcttttctgcaaactagcgtaggtgtactacaggaggagctggctggctggaggtcctacatcaaaacaaggtgagcgatgagacagactcctgaaagcacacacaccagggaaaattgtacaaactttaaatctttttctctcccttcccttcccttcccttcccttcccttcccttctcttttctttatagaaaatttattgcaactctccaaccgcacattactttttctcttcaacatcttgctccgcagcttccttcacgctttttgcttgggcattggcacaggccatgtgaagactggcaaaagccttagagttctcttctgtgtcgacgctggccttttcctttttgtacacattccgggtgggcatcacaggtcctgtcagttgggtggccaatttaagttcttcaacagaactgtctcccttcttcagagaaggcttcctgggggaaagtatgagctttgagcagtactcctttaggcgctgcatggtagcttgcagcgattcagtggatttgtttcgcctccttgggtccacagagatgccgatggtatgatttcttgtggttaccagtcaccctgagttcctccaggctgaagcccctgacagctcagaccttggtgtgtttttttttttgtttttgtttttgttttttcgagagagggtttctctgtgtagccctggctatcctggaactcactctgtagaccaggctggcctcgaactcagaaatccaccagcctctgcctcccaagtgctgggattaaaggcgtgcgccaccacggcccgacttggtgtggtatctaactgtagggcacttcacggtgggcctgaccggaccggatgcgggacgagtggcaatgcagcacgcttttgcctgccgagccctgagtctgcggatcttgcatggcagctggttgaaccaagtgtctactagctgctgccaatgtttgtggaagtggggcttcatgatcacgccattccggctggacgccatggctgcctcctgtacaggagaacgacagggcggagaggtcttccttctttctctatcctccctgacaaactttctctctctccctctccctccccccccccctctttggtttttcaagatagggtttctctgtgtagccctggctgtcctggaactcactttgtagaccaggctggccttgagctcagaaattcgcctgcttctgcctccctagtgctgggattaaaggcgtgcgccaccactgcctggcttgacaaactctcctgacacatggtatcatgtccttaagctggccttgaactcagtatgtagatgcttatgaccttgaacttctgatcctcatgcctctgtttcgtgctaggattacaggccagtgtccccaaacacgatttgagaatttattttcacagagatgcaatcatcatacaaccggtaaacggtgatctttcaacaaaagatggtgaaacaattgaccggatttcaaaacaaaacaaaacactcattcattatacaaatattcattctaatgaatactagatttaaaggtactaaagaaactttatatgacatctatggagaaaaaaaaaggaaaacttgtgcgttgtttggaaatggctttgaaggaacagtcctagttctagctggtaaatctggacttctccacatgcatcagcgaccaggagactattttacacacagagttaaatgcagaagtgactagacatttcaggaccagttttcctatggtcagaggaaagttaaaaaaacaaacaaacaaacaatactacctccattacagagtcctccgtgtattcatgtttattttcataaataacacagatagctacacactgagataattaaccaggcaccagcattactatatacatgtattttctaggttgctgcttagtccagaagcaatgaagcttcaccggttaaaggacactcaatactcacacaataccttctaaatctgtttttcaacaggaagtacccaggctcctcatagaaatggctagggatagacatagtgaaggcgaactacaaggtaagcatcactatcttagagtacacgaagcactggggaggtgatggcagcaagagccattctggactacataagaccctatcacacaggagaaaaaaagtagagattgtaaagggtaaattgataattaggggctggagagatggctcattgctgttccagaggacctgccttcattcccagcatccacatggcagctcacaatttcagttccagtggatctgaccacctcttcactaagacatcaagagaagtggctgggacatgtgttaacaagcacaagaatagtcgggcagtggtggagcaacgactttaatcccatcacttgggaggcagaagcagatggatttctgagttcaaggccatcgtggtctacagagtgagttccaggacagccaggactgcacagagaaaccctgtctcaaaacaccaaaccaaccaaccaaacaaacaaacaaacaaaagcaagcacaagaatcaaaagcataaaaaatgaggaaatttgttctcccttctgggattttcttcatttatgtgctcagggcacacagaaggttgaggagaacactgggaaatgacccacggaccacacattttaggcataaacagtgtggggagagttggaaaaaaaatccacacagaagcacacacacaaagaagccctacttagatcttcctctcctatacagaacaaaatccttattccatacaagaagggcaacaaatactacagcctctggccagttgtgaaagccatctgaccctggtgaatggacaggaaggggttaaataaaaacagttccggggaaaaggtagaaataaatactgtgtctaaatttgggaaagggagcagggggcaggagtagggagcaggaatccaccacacaatccaagactgagatataataaaccagcagatgaggcacactccctgccagtcacaaggctaaggagcactacagtacagcactacaacataaggcttactacagaagtaaagacagttacgtggaacaagagctctgagacacagcgcaaaaaccacctgagagtaatggagttatttaggaaaccagaggcaatggctccctgtcaaacaccctacaaagatgtatcactctgagaaaagcaagccgcagcttcatctccagagcagtggggcagaggcttaggccaggatgaaggaagacagagcccagaaagacatcctcaagaaaactgattaggaacacaatgggggaaggcaaaagcctaagagtggaaagcaacaaacaggaaattctaactggctgaaggtactaaactagtctaactcatcacttagtctgccttatgtgaaagctcactagtaggaagtgacagattgaataagagaaaaagcttgcaaattaaaggtagctatccacgagtctcatttaatttagaagcttacatgtaaccctattttccactggggagcaggaaagtggaggatgtttacactttaagtgggagtagtaaagtcgtttttatgagaattcaataaacttaagagaaacatagaatgggctaggactttctgttgagcctataaaccagtgagtggtactcgaactaccatagatgacaacccctttggcaaacctctatctccgaaaatatttacattgtgattcataatagtagcaaaactacagctatgaagtggcaatggaaataattttatggttgagaatcaccgcaacatgaggaactgcattaaagggccacgagcagcattaggaaggctgagaaccactgctctagacagacatctgcttgtgtactatttttatggaatttttatttttttctagacagggtttctctgtgtagccctggctgtcctggaactcactctgtagaccaaactggcctcgaactcagagatctgcctgcctctgcctcccaagtgctgggattaaaggcatgtgccaccactgcccggcttttatggactattaaatgaaacctaaggctaaggcagtgatgtagggagggcaaaggtgtatctaggaatatatagtttccaatttccccttgtggcacaaatcagtttaatgaaaacctaaggaaaagccagggatggcggtgcatgcactctgagttcagggacagcctggtctacagagtgagatccaggacagccagggctacactatctctaaggggaaaagaaaagaaaagaaaagaaaagaaaagaaaagaaaagaagggaaggggaaggggaaagggaaagggaaaggaaaagaagggaagggaagggaagagaagagaagagaagagaagagaagagaagagaagagaagagaagagaagagaagagaactcaagaaagagaatagaggtgattattatattcctcagcaggtctgagctgtataagcagaccaaagtatactttcctagtatcttctactctcatttgataaagcaagcataataaagcactgtgtttgggagtggccattcttggactccttcataggcttcaaacactacctttacaaaaggatacaaatttatttgagtgacattttagaacaacattaccaagagccatgggagagatgggggagatagttcaatgggcaaagtgcttgcatgaagacttgagttcagatcccaagcacatctttagaagctgagcatgacggcacagtgcagcactcatggatagaaacagatggctcccacaggcttgctggccagctccaggttcagtaagaaaccctgtgtatcagtcacttttctgatattgtgataaaacgtggccaaggcaacttagataaaaaaagagtttatttgggcttacagttccatgacagagtggaggtggcaggcagcaggcatggtagctggagcagccaagttgaacatcttgaactgcaagcataaggcagagacagtgaagtcaaaatggtgcaaatttttaaactctcaaagcctgcctccagtgacataattccatcaacaagactgtgcctccctagcctttccaaacaatggcagcaactagggaccaagtatcccaatgcctgagactatggtggatatctcgttcaaactaccacaccctatctcaaaaacataaggtaggttgactcagatcttccagaggatgtaggttcattcacagcacctataagacacctataaacaggtgttttacaactgtcaacagctccatcccaggggatccaggtccctcttcctgcctcccctgaacacctagcacacaagtggtatgcagacatatgtcagcactctggacgtagaggcaggtagatttctgtgagttctggggccagcatggtctacagagtaagtttcaggacagccaaggctacacagagagaccctgtctcaaagaaaacaattaaaactaaaaaacaaagtgaagcacaatagaggaagacacccaaagtcaacctctaatcacatgacgtgtgtacgtgtgtgcatccgtgtgcgagaaaacagacacacacagacacacacacacacaatgcctgggacaaaaacaatagattagcacataattaatacaaagtgatagttcaatatgataacaagaaccagagattaaattcaatgctgttctcccctaagaatgacaccgaggatgtagtataaataataagcactttagttgaagtcctgtcaaatcgtgaattgaaaaaaggagaccataccaatcaactctaaaacataggaagacacactactcaaagtcgctctgatgaacagagtatagttcatcaagcctatatccctgcattctggaaactaagaaagaagattgcagggggcagaggcaggcagatttctgagtttgaggccagcctggtctgcagagtgagttccaggacagccggggctacacagagaaaccctctctttaaaaaaccgggaaaaaaaaagattgctgggagtttagggcaggcctaggctaccagtgatttctaggctagcctgtactgcagagtaagactttgtctcagaaacaccctccaataaaagaaatcactgcaacatattaattacataaaatattcaagtttcaataaagacggaaagatatacaaggaagtgggagggtaggatctgtataaggaacagaaactttagtgatagaaaatgacttaaaaaacacagttcacacctgacacctgggactgctaatgacaacaggagctagaaagtgctcaaaccatttagggtatgaaccttgaaagaaatagctctgagttctatccttggccagaaactgggacatgcccttgctcctgtcttgtcaggagaccagaaatgcaaaaacaaccactatcataagagaaagagaaaataatttatgaatatcaacagttaaagaagagcccccagagcaccccacattaagtctggcaatggtgatactaacgtttgctaaatgaagacaaaaggaagtaatttcttgggaaacagaagttgtcatcgttgggttataagacaaagataaggagaagcacattgatctactgtagaaaccaaatccaggacaataaaggcctccatgatgtgtgacacatcatcaggcttcgtctccagtcaacaccagctcaggcaggcctcccgctcttgtttgtaggagaaagaggaggctaagtcgggaggagcacggcaagtttggggctcactcaacacggtgcatgccacatagcctacagggtaaaactgtgtctttaaaacagaaacaagcaagcaaagaaacaacaaaatcctcagctttcctaaaacaactgaaaagcaaaagccacttcccaactatcggtccagattaccctgataatcaaaaccaaagagaaagcaaacaagtaaacgaaaatcaaaaatacaaatcagtattgcttgggtacaaagactataacaaaatattacatttaattaaataccacctgaaaggaattcgagtttgggagatatgtcagtgtgaaatgttttctgtgtacatatgagggcttagttaggatcccagccaccgtttttttttttcttttttctttttgtaggcagtatgacagcatctgtcaattcagcgctgggaggtagagatggcaagatcatagggcttataggaagagaacatactacaggcaaatgtagtttattgccagaccccaggggaggttaaacgttttaaaagtcaatccataatgagctaggcacggtggaccatacctgaaatcctagcccctgggaagcagggcagaaggattgggacttcaagggtaagctagactacaagcaagactttatcttaaatttgaattagttaagtaactaattcattaactaattaatgattttaacaacctgggctgagagcataggtcagtgggagagtgcttgcatagcacattccagttttaaccccaccatcgctgaagtgactgtggtaacgccatcttgtcctgattttaccctgactccactttgttcaggtacctttttcagcccctaatcccctaaaaagtccaacccaccttgacagcatatttggaactttctaaggccctgaccacagcacaggtgaataatcaacctaacagctgaatgtataatcaagagaaacgttaccaggtttccccggacccatgcctgccaatgacatcattgcagtttttgcctttacaaatgcagtacctttgagcttcagtgctcttcagagcaggagtctgcactctgttccaagctaataaaggactctaatttggtcttacattcatagtactttgaaactttcttgcttgggctataactgcaaaataaattttccataccaacagttgaaagaagaaacacaatcataccaacagatacatttttaaaaatccaatatttatttattatctatgtgtatgcattattttgtgtgtatatgtgttcataagtatgtacatgtgtgtgtgtgtgtgtgtgtgtggagttcagagagtgatgttgtgtcatttccaatcactctcaatgttagtttttgggacaaggtctcaaagaacttagagtccattatttggctaggctggctggccagcgagctacagtaatccacttgtgcctgataccctcactcaactggagtcacaattgcctgtcaccatgcccagtgttgatgtactcaagtgttcctgatcctgctccaagcacattacaacagagccatttccccagcgccctcccaatcaatgttcttccatgataaaaactgtcagtggacaaggctagagagatggttcagtgatcagtatcgattcctggtcttgcagaggactgggtttcagctcccagcagtcatatccagtagctataactgatgctgaaggtcctctgctacacattcatcatcttgctactgaggtactataggcgcgatgctttttctgtggttatataaatgaaactttataaaatttaatttataaaaaaaattcaaaattcaatttctagtggtttgttgctaatatattagctcactaattttgacttgagaaagaatcttatctaacccagactggcaccaaactcacaagttagctgaatctagtcttgaactccttcatgatcctcctgcttctatctctgaagtattattaactccaattacaggggctctgataccctctgctctctataggctcctccatgcatgtaatgtatataaactcatgcaaacacacggaaatgtaactaaatacatcttttttaaaaattctcagctaggggctgagaaatggctcagtggttaagggcactggttgctcttccagaggatccaggttcaattcccagaaaccacatggtcgtttacaactgtctgtaactccagttccatgggatctgacaccctcacacagacatccatgcaggcaaaacaccaatgtatataaaataaaaataaattatatatatatatatattctcagctaataggaatagaaagaaatgctaccacaacaaagcatatgcacatacaaatcatagaaatgcttaaagtctgaaacttttctcttaagattatagtaaaacaagcccggcagtggtggcgcaagcctttaacccagcactcgggaggcagaggcaggcggatttctgagttcaaggccagcctggttgacagagtgagttccaggacagccagggatacacagagaaaccctgtcttgaattttaaaaaatcaaatcaagattataataaaacaaagaagacctttactgccagtctaaagcagtggtggttgctgttcatgtagtaatgttttaaagattgggggggggggggaaggggagacaggaaaaatattcagaagaatgatcaaaactgaagccacaaacactaagtagactatcccaaggaaacttaggtgccatggctaatctctacaaggactccctgcctcaaaagaaaataaaaactgtaagggcttagaatgtagctcagtgggagagtactgcctaccatgttccattgtgagttccatccctaatactggggagggggtgtttagaaaaaaagaaaaccaaaagaatatacaaaaggataacatatcaacagtagattgtttcaccaaactggtactatccaaggccagtaataaaaatcagtgtggaaaccgggcagtgtggaaaccaggcgcacgcctgcaatcccagcacttgggaggcagaggcaggtggatttctgagttcgaggccagcctggtctacagagtgagttccaggacaaccagggttacacagaaaaaccttgtctcaaaaaaaccaaaaccaaaaccaaaaaccaaccaaccaaacaaacaaacaaacaaaatcactgtgaaagctgtgtggagcacatctgtaatcctagcacttgggaaatgaagactggagggaggatcaggagttcaaggaaaggctcagctacctggggagtttggggccagcctgagttacagaagatcctatctcaaaataagacaaaaatcaatgtgctaatatgctaaaaataaaccagtataaactggaaatttgtaaagtcttgcttatataacagtaggggggaaagtcactattaaagttctacaacagcaaagtgataaatgtataacaaactactatatgcggaaaactaaaacaaagcaaagcaaagctaaaggggccttaatggaatgtgatgcccccagactgacctacagatgaaaagcaatccaaaactcctagcaaaaaatttatggacactaacttactgtgtcaaaaatttatagatgatttctgctttacagtacagaatgctcagagcttgaaaactcattctagcctggcatgctggtacatacctttagccccagcactcgggaggcagaggcagaggcacaggcaggcagaaacactgtgagtctgaggccagcctggtctacatagtaagttccagaacagccaaggctatgtagtgagaccttgtctcaaagaaataaacaaataatgataaagcaagcaaacaaagagcctgggcacagggagagcgatgccatggagagtccaaaaattcttcataatctctcacgatgaacatcggagaaaaatcccatatgcttaggagggtgcaaccaccttcaaatatattcagccatttcaaaatacataagagtgttctgtactgaacaaggctcctgcttaaaaaaataaactgctttgtcaaggactaaaggagatgggaaaggggacagacatatctgggtacccaattccagcctgaagtttccaacccacagctctctcgtcatcacatctcacttacatggagggggagagataattaggagggtgggcaattgtacttcacaacccaggagcacacaagcagtaaaagacagaataaccagggacattcagaacatgtcaaatcaccacgtatcttactaccacagccctacaggcctatgtactgtagttccttttactggctacatcatacttgactttcaaaaaaacctgagaaatgagggggggagacagacagagagagagagagagagagagagagagagagagagagagaatacaaagcacatgccctttaactgtcaaattgacacagtctacagtcatctgagagactgatcaaatcacactggcctgatgggtgccatcattccctgggtgagtggttccgggatgtataagcaagctagtacgcacaggtgagccagcaagccgtattcctccatggtttcttcttcaagtccctgcttgagtttctgctctgacttccttcagtggtggattaatgatctggaagtacaagccaaataaatcctttcttcctctactttgcctttggtcagtgtgttatatgacaatagaaagaaaagtaaaacaaaacaataaagacaacacagtttaaaattaaaaaatccagcatgtattagtatcagacttaaatacgtactgaatgttggaattattaaactgaaatatttgcctgtttttcagtgtcagttcaatggctgaaagtcaattaatagccataagtttgatggatcaagtctgaagcagaaagattgggaattccaggccagcctaatccacatagcaagaccctgtctcaaaaacacaagaaagaaattgatatgaacacagtctcagagcccttggtgttacccgaagggtggagcagcaggatatttttctcctgagccttacaaaggtcatattgggggagtcacatgtccagtcacatactggagcctaacctgctgggtttcttgccttcaaatctccatagaacttaagtgatggtattgttacatctcagaaaggtcagattcatcactgatgtcctgataaccctctcgttgggaccacacatatggtcttttctcataattggctgactgactttcagtagctgaatcaaagtcctgaaccactgctgtgcagaaagatccatcggcacagtaacgttttttacacaagtggaaataacattctaaatttgagtctcgggcgctatattgtttactcttcaaaagtaccatcagtgtcccaaagaatatagcattcccaagattcaaatatgtgacttcctttgcctgcatgcagaaccatttaaagtgacttatagtgtagccgcccgcgtaatgccctgttcaaagcttcctttgtttatgcagtggcaacagttgccctgtatctataattaataaagattaattgctaatatggactattctggtcttagtaagatcctatgcaaatagaaattattacttttagttttgtttttatttattaaaattttaaatgagatttatttcattttgtgtttgtgcatcacgtgtctggtacccaaggaggtcagaagaggatttggaccacctgggacttgagttacaaaatattgagaactcccatgcaagataccagccatgttagatcctcatgtcacaaaaaaattaagtggagaagctgagcttataatcctagctatttgggaggcagaggcagaaaaatcaagaccagcctgggttattacacataaagtaagagagacaagctgggcatggtggtacaagcttgtaatcccaaagcttggcagctagaaatgggtagtgagggtcgtggacagcctcaactacagaagacttcattaaggggctcaaaaagtgggcttacgaccgcctgtaactcgagttccacaggattctatggcttcttctggcttccataactgtactcatgtgcacattcctacacacacaattagaagcaaatcttaaagtgggaacagatctagatatagttcagtggtagtgtgactgtctagcaccacagtgtcctaggttccacaaccaatactggggggaaagggggaaataagcacaattactaaactaaaaatgatgcttaatctacgggatgacaaaagagtgagccgcaactgtggagaaatatggcaaaacgtcaactctaatattagggtttcattttattctctgtgtttgcatttgtgttaaataggtcataatatataaagctgccgaaatgttttaaaaatagcaaacattcctttgtcaccctcatacatatatgaaaaaaatgagatcatattatcctacaacttgtttttaatgtaacaagctatcatatcatcttttacaccaaagagccaaaatatacagacttttaaaacatcctcctattaatggatacacaggttgtttcttatcacttgccacaagaaaagagctgcatagacatcctcttttaggtatccttatttatatactgatgcttctctttctgaaggattgagccgtgaaagtcagactactgagttccagatattggaacttggtactccatatatatttttatttttctaaatatagctacatcaatgcttccaaatggttgcaacaattcatactttattcagcaatgcctagctaaggtactgaaatgtctttttgaccaagtaagcatctaacaaaagaacacagatcaccctataaggccctattataacagatgctcccagaccacaaatttagtaacatactctggtcctcatttggagtacataaaaagggcatagggcaaaaagcgttattataccataattaatgttaccaataagctagttttatcaactactaagtgttgatgagaaagaactgaggccgtttttcgaggcctctggggagctagaataaacactccattttggagacactcactatccgtcaaaccccaattagacaaaggaaaacaaaaggaaacctcaaaacacgatctctcctaggaatgagcctccccagcctgacaggttcatccgtggaggtccggtgatgtgggcactgatcactcatctattgtgggcggaataggggagaaatccggagtgccagccgccgactactcgtcccgctcggcagaccatgcggtcggagtggtgaccgctgcggcgggtcggcgtggtgaccgctacggcggccatctctctgacagcgcgagacccggcactcaccagggcatgttcattaattggccagtttctccactctccttattaagtcatcctctagctgcctggctaatcccgggaaggacgtatacatgtggacgccgccattttataagttacagaagcctggtggtgccgtgggggggggggggggggggtcgggcgggcggagagcatgcgtcacagccgaacagtccctgtgccgcgcggcgccgcgctgtcaggctgtccctaaatggctgctccagcaacgtgaccgggactgtccgcggtcgcttccgcagatgactgagcgcttgcggttcctctcccggctgcctctgttagcatctttcacgtgctcccgcgtttcttgcccgtctttaatttgttctcttgccaccccctcaccccccaccccccaccctacccccaccgaaattcctttttcttttttgtttctatagaagaccagcttgtgttttgctcccgagatctctttcggagccccttctgtgtttttagctgccagcattgctgtagctgctataactgcaatctacatgtcacagaggctaggtggcaaagtaaaccacaggcctgggtatgtcccctagtttttgataaagacagaattataccttgtcctattcctattggacacctcacagggccgaagctgacaataactcctttggcttttggatgttcacaccaatactggttaccacacaaattagaaaaggatcttgggttatcaataaaggcagagaactacacttccatttaaaaaagaaagaaaaaagttctcattttacctattgcaccacgaggcacaggggcagaagcgagtgctcagtggttaacagtgcttaatgctctagcaaaggatgcaggttcagtccccggcacatacttctctctacacagatctctctacacaggcaaacatgtatacacacacacacacacacacacacacacacacacacacacgaagtaaatgcatgtgtgtgtgtgtatttaagtaaaaccatgttggaaagttgccgaaggggcctcagtgaatatctgcttgaggaaggctttgctaaggcaacctgggacagctgtcatggagccgagggctgtcctctctccagaaggtagcacattttcccttacactggtttccctctttcccaagacagcaaagccctggcttcttttcattccattacaggcagttctttcctgtgcgagctctcctcagctgtagccagaatttgcctgtttggaatcctttcttcctcctagagtttctctgagatggcaagtttgtgaaaattattacacacacacacacacacacacacacacacccatggccaagacaatcaatttgatatgctcctgtgactataaccactttattgcccccccccatttaaatttttaatctagattcccttccccctctctccatgtgctcatggccagcctctagttctctactctctctttctctctctctgcctttccctgcctctgctaccctcttaactcccctccccatgccctgaataaactctattctatactaaaaaataaaattaatctaaatataattacatattctcccccattcccttctccaattcctcctatgttattcctcgccactacacacacacacacacacacacacacacacacacattgcctctcaaatttctggctttttgtatatatgtgatttttctctgggtgcgtatttggtttctacttatctttgttgttgaacaccccaaaagcagggctggagagttggcttggtgtgtaagagtacttaatattctcacaaaggactggggttcaatgcctagcagctgcatgaggcttctcacctcctctgacaccatgctcgagtgtggtacacagacctatatgcaggcaaaacactcacacacataaaaattctaaaaaaaaaaaagtttttataaacttaaaaaaaacaaaagtcaaatataaaagttgattcagggtatctgggagcccaactgtctgcatttccaacttcattctaatgtctgtggcaaaactgttgaaagaagtacctaggaaagtgtgactctagctaatttttaaagatttggcttttcaggcatgcatatcgttgttgctcttctgtttttgagacagggcccccgttattccaggctggcctcgacttattacgtagcagagaatgactgtaaattcccaattctccttccttccccgggcctcactttatcttctacaaacttcttgtgacatactcaggcctttggcaatagactaaaactttctggttttttccctcatcacccctttttgtccatatgggaacaatcttttagttttaggataaaaaccttatactctattctcatctaaaagtatttccttaatttcctttaattttctttatataaatgacctataacttcttacaatattttacatttatttatttttgtgtttgagaaagaccaaggcggggtagaagaagggagagagagagagagagagagagagagagagagagagagagagagagagagagagaatatatggatgtgtccaccacatagtttccaaggatggagctcagggtgtctgccaggctttgaggtaagctccttatcagctgagccatcttgcagtcaagactcagcccgtgtgtgtgtgtgtgtgtgtgtgtgtgtgtgtgtgtgtgtgtgtgttactaaggactgaatccatgattttctaattacatgctaagccattgctctaccactgagccatattgccagccccaagaaaaatgtttttctttctttctttattggtatctcaagatagagtttctctgtgtagccctggctgtcctgaagcttgctctgtagaccagactgggaatcagaaatcctcctgactctgcctactgaatggtgggattaaataaaactattctttaatattctaaatgaaaatcaaagaaaagctgagcaaagtggtgcttgcctaaaattccagaatttgagagagttaggaaggagcatcaggagttcagctcatcttcagcaacacagtaagttccagatcagcctgaattacatgagaccacgtgaaagaggggtggagagcaaagccaaagcaaaccatgaggctgtatatgaaacataggaaacaacatgctatcagtctttgaaacagtcctgtgttttcttacaatttaagttgcactgttgttagaaatttatgtcctgttagaacaggttttcagaaagtgcttttgctaaaggtattgatggcctacttggcttcacaaggtaaccaaccacaggattaaagacttgagtctctgccttcattttgagtctgtctttccgttcatttcaaactcctgcttgactgtgcataggcatattaataacagaaggagtgtcttcctaaattatttcattcatccttagtcatgttgaactccaagagcaaaacctcccaggacagaccttcttccatatgagggcagttatccatgatgcaaggcaaaagtaatcagcttatgcttcaaacatgagccaccctttaaaaaaacaagaactctctcaagacatagtatggtctcaagctcaaagcaattcttctgctgggattataggcatgtgctaccatggccagtcaagatgagggtttctctgggctatcttgcagtaccacaagacacaataattagtcaggctacacctcgaagaaaattacttttttttcataatgagctacaatttatttatttattgaatttggagtattcctcgatatcatccttggcctaagattctttgccatagtccttaaccactacgcaacagcaaccgaccaccttccgtggtttcccctctcgatcgattctacagaggcctacccattcccctagtttcttgttgtcatcaacctttatcaggttgatttggtgctcagcacaaagtgcctccaccagcttgacatacatgggctcatcacagttggatgcgagcacacagagatgggcttggcgcttgtctaactaaggctttggcagcttcgagtatgccacgtgctaggccatcctggatgagggcggtcttgagcacctcttgtagagcagtgttgacgtccattacacctccagcagctatgccttcctcggccatggcggtggattatgggtgacgccgaatcttgaacgcacctgagcttctgcctccgcgcaaattggtggcggcaggggaaaaaagcgaaaattacttattatgggtactccttgttctctattgaaatgtctctcctatttttagtttaaatctcaatactccagcgataggggcagggtcgttgaacccttctatggctcttaccacttgaccacctttgtcatcaggttatgctactctaagttactccatgttatataaaacattattagctcgtgaggtcaaactgccagtggcctattctttaaagaaaactgaacctggatcgtctggaaaagcagcgaatcctcttaactgttgagccatctctccagccccccaaatgtattattatctactctttctgtttgtttgtgtttgttttcaaggcagggtttctctgtggccttggctatactggaactgcctcggtagactatgctggtctcaaactcagagatccatctgcctctaactcccaagtgctgggattaaaggtgtgcacctccactgctcacattccatgggtttatcttaatcacatctcttttattcatattgcaacctcaccagtaccctcagtaacgtcatttaaataaaacaaacaaacaaacctgggactagagacatacctcgatgcttacaaacatttgctactctttcagaaaatccaagtttgattctcagcactatcaggcagttgacaaccacctataacttccgctccaggggctttgctgctctcttctggtctttgagggcacacacagaccatatacataactaaagtcagaaataaaccttaaaaactcaatacttttcaatgatgtaatggggatctaaagagatggctcagaggttaagtatttgccataaaagcatgaggaccagagttcaagtccccaaggcgtgaacccatgtgaagccctcctataattgcagctatgaaaggctcaaacagggatccccagagcaagttgcctaacaagacgtgccatatcagtgagctctcggtttggctaagatcttgcctcagtaaacaaggtagaaaaatgattgaagacattaaacttaggcctatatattcacacacatatacatatgaacctatatacatgtgtatccacatctatggacaaaatgcatatacacacaaaaatggaaaaggcaagggtagagtgggaagatgaacaaatgttttctttgctctctcaaccttggttataaaatacttcctttaaataacagaaacttaaaaaaaaacaaatcaggtatatagctactactgctggacttcagtccatgcccctcccaatacccactcatatctttccttcatcttattcaataagcattcttaagttttctgtaatataaatcaagaatcacaacaatatataactagagagaactctgcggttctgaggattcctcaggttgcataattgtgaccatcaacttgcattgcctgctcctgtgccaagactataacaccggagtatgtaatccggagtatgagctgagaggggaaaaactgatgtggcaagtggaagaacagatatagaatctatgtatttatttacttatttatatataataaaacacttatacttatcacttatatctgtgaccggtagcacatgcttgtaagcacaacactttgtaggcaggaagttcaccataagttcaaggctagtttggtctacatagtgaattccaggtcagcttaaacagtccttggaataaaagaagccacagagatggcttagcagctaagaacacttgctgctacagcagaggcccacattaagttcacactcctctgagacccatccaccatggctctgcttcccaagtgctcgtattaatggaatggatcattacatcttctccaaaacattattatttgtatttacatttgattattacatgccaggagggttttgttttttgttttgtttggtttttttttttttttttttttttttttttttttttttggttataattggtactctataagcttcttgtatgtttataggcttctctttctttattcttttcttttttatgaatgaggcaatttattaacccagtattattttttctaatgcttcttgttggcagctgccacctgttcagcgatcctgtccagatgtgtttcctgtccctgaggtgttagcttgcggcccccatctcggcccttttccaccattttcagccctttcagggcttggaggacctggcaagccatactctcagagcctctgctgaagtggctgggcctaacaccgttcctctgccatccttcatagatcttggtcacggaaccaactcctgcactacagttgtgtacagaggtacaggtccggagttgtggaagcagctcgtgggtagaaccagttctcatcatatggggcaagctctttatgtttggctaacttgactgtgtccacccattcccgaactttcagcttcctggactttttgaggaaggctgccagcgctctgacgaacctgatggttaacatcttttacagtgacttcaggcatcgttcagcctccatgctgccagccaggggaaagggtggcatctctttaggttgggaaaattttcttctgattttgttgatatttttccgggacttggagctggggactcttcactttctattactataacttataagttggtatgcctgttttatgaggtgctggagattgttttttgttatcttatataaagtctgtgaagttgcacatgaaagcctgatctttagatcccttagcactgaaattacaggcagtaaagatttgtctagtgtgagtgtaaatcttgaactttggtcatctggaatattaagcatctcaagagtaatctaagagcagtcttaagcaccataattgatcacttcttaggtctggggactaaagacatgcaccacgtccacctggttgaccacactttaagagatagcattgtaaaggggctttctaatattttctagggttaaagtctattgtcttcatggtagggagcatgtcagcattcaagaagacatagtactggagtttgacatctggttccacaggtagtaggaagaaagccaaccaccggccctggcttgggcttctgaaacctcaaagcccactccctagtgacttatgtccttcctaattcttctaaagtagtgccacctcctccccgctcctgatggcttagtgataaaatgtctgaggctgtaggagtcattgttcttacatgatctttggtagattgatttctgtatagggtgagatagtaccactatgctaaggatcacttggccaagtgactgtatgtctcttacatgtggtgtttgtacctttgttgagtagtggatggctgtctccaggtcctctattctatcccactaatttacaagcctacctatgagcagtagcatgttgacgctgtggtgcaacctgttcattcatttgaagctttgtcatgtagctcaatctggtctccaattctctatgtggctatttctgatcatccttgtaactcccaagggctgggattcacaggcataagctacttaccatgtcacctatttttaaaaactatttatgtgaatgtcattagaattttgctgagtatagcgctaaatccatagatgggtttttgatgcaacttagacaatattatgttgattcatgaacttgggagtgtttcttcaaccattttataccagatcaacccctctcccaatatacgttagaattgaaaaaaatatagatttcctggagagactggatgcctgatctacctatagttgtggctccaactttctctctgttcacagagccagtagtgtcattgaacatcccttcctttaaaaaaacaaaccatttttcatgatttattttgatcatttttccttcctccaactcttccccactcatccaaatccatattcattttcttaaaaacaaaacgaaaactgcgctgttttgtctggatggtgttttcttggagtcatttactgcagtctttctgactccttatcttcatagatgcctgagcattgaaagaaagggcttgatgaagacatctcatctaggaccaagtgttctaaagtctcttactctctgcacattggaagaccatttcttaactcccatttctgtttcttgctgctttgtagtgggtccttgtttcttgacccattatcatcatcatcttgttcttccttcttctcctctttgaatttgcatggagaattcctcaagattactattttaccccaggtgcatttttaatcttaatgttaagaatatgcaatgaggcaggcagtggtggcacacacctttaatcccagcacttgggaggtggaggcaggtggatttctaacttcgaggccagcctggtctacagagtgagttccaggacatctggggctatacagagaaaacctgccttgaaaaacaaaacaaacaaacaaacaaagaatatgcaataaattacctagttaagtgtacaggaatggaggtgttttttagaaaaatatttatttaatgtgagtacactgtcggtcactgttcagatacatcagaagaggttagatatcggatcccactacagatgactgtgagccactacgaagttgttgagaattgaactcaggccctctggaagagcagtcagcactcctaaccactgagctatctctccagcccaggaactgagttttagcacatatcccttcatgctttcttgtgataagactaaaaagtgtccccgaaacctgacataccttgatgtacacggtgtgagaaagaatgatgaggtttgcaagaattgggactaagtaaaacacagagactaaatttaactctttaatttgatgattctctctagcatccccacaaaaatgatacactggcttgcataatctgtgaccagtacctcgcaagttctaaattctctttgtacagctcatttagaagttctcgtttatacaaagccatatccatcgtggagccaggtgctcttagctgtgaagagcccttccttgggtcttttttccctaatatgtcctatgtgacttctcactggtgatgcttttggtgtgcttgttactctgatcctgatcgctctgtcaactaaagttagacaaagtaacctttacttctcaattcagataggaatccttttgcactccaagtttggcttcagatgccttggaaagattcatgctgccacctgctggtttattcagtctgtgtgcatcatttatttacttgttaatttgtttttcttttgttgaaacagtttattttgtagcagatatttttccatccctacctgaaccacctcaatagtaagattagtgaattgctggcactttgatcgtccataagcaaaccaattttgtgtcctttattattcatgggacgcctaaagggaacttagaacagactgtgaattatttgtcagcgtgaatcaacgagacaacaatatcctttgattttctaatacccagggtgtctgatctctttcatgtggatattcatagtttgacagttaacaaaatttgacagttcttttaagttagcagtgtctctggggcgagtaagataccaatgagctattattccctcaggctttgctttggcatttaggaattatttttcattactgctagcgagtaacgtacttcagtgcgtttttgtcccaaggtatggagtcaccaggttcccagagaaagactaagatgccaatgacccaaaactatgagcgtaagcccaccaaatcggtcacaactaatactctgataatttaggaaccaaggagccattttgtgaggcatttctaccctttcctctcctcatctgaggtcgccaactaatgcagaagaacttctagtgtccaagacgcggagcgatacatggtttgtccaagtagaagatatattgaaattttgcatagacaggtgtgtgacctaatgtacattatttaatgtttatgtggaagttctacataaacgtttttagctgtaaaataggataatccttcattatcgcgcaaaataatgaaattcacgcgtcatgtcactgagcttacgtacctccatctttattcattttaatttttttataatatagttagacctaaaggtccaataagatgtcagaattgcaatctttgtggccactcctcttctggtctctccgccttcagcgccgcggatcagttaaaggcgtgcaacggcttgctccagccatgtttgctcgtttcccgtggatgtgcggttcttccgtggtttctctccatctaaggagctttgggggaacatttttagttcccctaccaccaagccttatggcttatttaagaaaacatatcaaaattccacgagatttttgacgttttgatatgttctggtaagattttttttttgacatgtcctccatactttttgatatttgtaatattttcagtcaatttttcatttttaaggaatatttctttgttgtgccttttggttgatacttgtgtgtgtatggtggacttacctttctttcattgtttatatattcttgcccatcggggccacggatacctgtgtgtcctccccgccattccatgcccaacggggttttggatacttacctgccttttcattctttttttttcttattatttttttttctaaacttgcccatctgggctgtggatacctgcttttattctttttttcttctccttagcccatcggggccatggatacctgctttttgtaaaaaaaaaaaaaaaaaaaaaaaaacctttctcggtccatcgggacctcggatacctgcgtttagtctttttttcccatgcccaacggggcctcggatacctgctgttattatttttttttctttttcttttgcccatcggggctgtggatacctgctttaaattttttttttcacggcccaacggggcgcttggtggatggaaatatggttttgtgagttattgcactacctggaatatctatgcctcttatttgcgtgtactgttgctgctgatcgtttggtgctgtgtgagtgaacctatggcttagaaaaacgactttgctcttaaactgagtgggtgttcagggcgtggagagcccgcgtccgccattatggcttctgcgtgatacggctattctcgagccagttacgccaagaattaggacaccgaggagcacagcggactggataaaagcaaccaattgcgctgcgctagctaaaggctttctttatatgtgcggggttgcgggattcgccttgatttgtggtagcatttgcggggttgtgctagccggaagtagaaagccaaggagtgctcgtattagtgtgcggtgttgcgcggaagccgcagaggactaggggatagggctcagcgtgggtgtggggattgggcagggtgtgtgtgcatatggacccctggcgcggtcccccgtggctttaagggctgctcagaagtctataaaatggcggctcgggggctccacccgaggctcgacagcccaatctttgttctggtgtgtagcaatggattataggacatttaggtcgtacaggaaaagatggcggctcaagttcttggtgcggtataacgcaaagggctttgtgtgtcacatgtcagcttcatgtctgagttagcctggagaggtggcacatgctcttgaatgtgtctaagatggcggaagtcatgtgacctgccctctagtggtttctttcagtgattttttttttggcgggctttagctacttggcgggctttgcccgagggtacacttggtgcattatggtagggtgtggttggtcctaccttgtgccactcgaagctgaggcaaggctaagtggaagtgttggttgccacttgacgtaactcgtcagaaatgggcacaagtgtgaaagtgttggtgtttgcttgacttccagttagaaatgtgcattattgcttggtggccaggatggaattagactgtgatgagtcactgtcccataaggacgtgagtttcgcttggtacttcacgtgtgtctttagtcatcattttttcgaagtgcctgcccaggtcgggagagcgcatgcttgcaattctaacactgaagtgttggatgatgtcggatccgattcgagagaccgaggctgcgggttcttggtcgatgtaaatcattgaaacctcacctattaaaagaaagaaaagtatctaaggccatttcaaggacatttgactcatccgcttgcgttcatagtctcttacagtgctctatacgtggcggtgcaaactaaaactcagcccgttccattcctttgtattgttcagtggctagtctacttacaccttggcctctgatttagccagcactgatctcaagcggttctctaagcctactgggtataagtggtgactttggccagagtcatagtggatcacaaatcactggtgaagaggtagaatcctaccttcttccaaaatctaccccatgactattgctggggttgcattttgatttcaatgaatattttggatgccaacgacacgtctgatagtgtgctttgctagtgtttgaatttaaaaccgaagtgattgttttcaaaatgtatttacggatttgcttacttgttgaattcattttaattacctttagtgaattgttactttggagtccttaaagttttcaataatttttttggcagatgatactcaaattacttggcacttaaatgtactttctttcaaactcatccaccgagctactcttcaaatttttaagtcttataacacagatactgttaatgtaaagtgaacattatgactggatgtcaggagtatttgaggttctataccagttcaggctttgcttttgttgctattgttgatgctatattgactaatggttttacttgtcagcaagagccttgaattgtaatgctctgtgtcctctatcagacttactgttataatagtaatattaaggcctacatttcaactttctgtgtgttcttgcctttatggcatctagattctcctcaagactcagcaaatagtgctgctgctattgctgccccagccccaggcccagccccagcccctgccccagccccagccccagcccctgccccagccccagcccctgcccctgccccagcccctgccccagccccagccccagcccctacccctgcccctgcccctgccccacccaaccaacccaatccagtccagccctgccccagcccagtcctagccccaggcccagatactttcagacctatcccaagcccacttctacttagagaaattcgaatcttcattgattcagtgctaaaatgcagtgtccatcactcagcctataagactgagacagcccatctataccccctccatactgacttctagagtcatggaatttcacttaatgcatagaatcgtattgctaaaatgcagtgcccatcactcagcctataagactgagatagcccatctataccccctccatactgacttacagagtcatggagtttcacttaatgcatgcagtcctattgctaaaatgcagtgcccataactcagcctataagactgagatagcccatttataccccataccccctccatactgacttctagggtcatggaatttcacttaatacatagaatcgtattgctaaaatgcagtgtccatcactcagtctataagactgagatatccctatgtataccccatactccctccatactgacttccagagtcatagaatttcactttgcatacggtcctattgctaaaatgcagtgtccatcactcagtctataagactgagatatccctatgtataccccatactccctccatactgacttccagagtcatagaatttcactttgcatacggtcctattgctaaaatgcagtgcccatcactcagcctataagactgagatagcccatctataccccctccatactgacttccagagtcatggaatttcacttaatgcatgcagtcctattgctaaaatgcagtgcccatcactcagcctataagactgagatagcccatctataccccataccccctccatactgacttccagagtcatggaatttcacttaatgcatgcagtcctattgctaaaatgcagtgcccatcactcagcctataagactgagatagcccatctatacccactccatactgacttccagagtcatggaatttcacttaatgcatgcagtcctattgctaaaatgcagtgcccatcactcagcctataagactgagatagcccatctatacccactccatactgacttccagagtcatggagtttcacttaatgcatgcagtcctattgctaaaatgcagtgcccataactcagcctataagactgagatagcccatttataccccataccccctccatactgacttctagggtcatggaatttcacttaatgcatagaatcgtattgctaaaatgcagtgtccattactcagcctataagactgagatatccctatgtataccccataccccctccatactgacttccagagacatagaatttcactttgcatacggtcctattgctaaaatgcagtgcccatcactcagcctataagactgagatatccctatctataccctctaccccctccatactgacttccagagtcatggaatttcacataatgtatagatttctattgctaaaatgcagtgcccataactcagcctataagactgagatagcccatctataccccctccatactgagttccagagtcatggaatttcacttaatgcatagaatcgtattgctaaaatgcagtgcccatcactcagcctataagactgagcccatctataccccataccccctccatactgacttccagagtcatggaatttcactttgcatacagtcctactttacttgtccatggacaagtaaacaaagaactcttgtccttcatgttaatcaagatacaccaatcaaacaagagttttatatcagagacttgccatggaggtatcatctctcaagtctcctttcctttaaggaaagaaaaccattctgtcattgctgtagtagtcacagtcccaagtttctaagcagtgttcagtcgtcttttctcatgtattaccttgagtactgaataattctgtcagaaatattttgtccattggattagactttagctagtccagccctgtgtgcatttagcaaaggggcaaacacaggtctgttatcagacagttaaagtgctcagtcccaattttcaaggcattggccattaaagggggtagaatactatatactgttggcatgctgtcatgggtgctatcgccccaggtcacatctttctaactgatggagatacatttatttgctcatgatattgtatactagtctcacatgctttcttatttcagccaaaaacctctgcactggaacattttatgtggataatcctgactaggaattgagtcttttctcaaggtcctaatactacccttgctttatgtaaagagggtgctgattacttaatgcctcttacacaattgtgcaaaattgcagttgttcaagtccccttctgttagtaaccaagatcccataccctcataccctaatgggtgacaatcaagggtgccaaccaatgagaccacttctctgttctggtctttctgctgtgctggggaatcaaaccttgagtcttgtgtacgctagtaaagcactgtcatagagctacagccccaccgtgtggtggtttgagagaacagcctcttatgtagcctgggctgggcgggacttacaggcattgccacctgtaatgtaaacatatttgtgcctgttgtgtgcacagctgcatttgtccctcttcctaagcattggataaagaaaccaaactaagtcaagtcattttgttggtaatcaagaagacctttgatctgtcctgtttttaacttccaggctggcctggaacttagcatataacccaggctagccttgagctcaggatctagcctgcgtttaacaagtgttggcatatctggttcctaccactatgccctgcatgcagtctttcatattgtgaatgtgcatatgtcatttcactgtagtaatctgcatctggtgaagacttatttgtattgcagcagtatttaagatccttaacatagtaaatgtgcacagtgttaactctattgtacatattctcatgtccacagttgtgccttttagatcaggactcctgtacttagcaaagcaaagaggctcactaatataaagcttctttcatgagactatagattgaaacgattccaatacggtcaatggtccttcaaggtaagacttctgtctctgatcattcatatcctctttgctttatggaattatgtatgtgctgtgcacttgaaaccccttcctcaaactatttatgtacatactggcaattttagtaggatcaattttactcttaactttgaagtacagaagtggtgttgacctataaggtcccattttgtggcttgctaataataatgactgattgtagtaggccttttctgttcactacagaaggaaacctgaacagcgtaaaactgtaatggccataaacatgtaccttgcatattagtatgcatttactgcacacatctcattccatttggatacgatcctactctcaaacccttttgcagtacagcaagggtcactaatcttttggcttcttcatcttcctggacactggataaggctgtcccctcctttccactctttaatttccaggactattactttaaagacttaatatttgcataaaggatggggtttttaattgataacatgtcccttgaacattaatgtatataacagggacatgatccattcattttaataaaaatacttggccagttaatgtgtaaaattacacttatccacaaccttattacttttcggaccattgtatctcttgcactcctgcaagggataccgtttatctcccaaggtccctgctagtggaccattaatatacagtgaatcttcctttgtctttgccagtaaacaaaggccatactccttcgcctttcatttgcactatatcaggatatgctgatcaacaaggccgcattcttttggactgttatcatatattaaatgtatgcgtatgcactgccacctgctctgtgcacttgaaaggatcccactcacttccttagcaccttcagcaggaagtgataataagctcaagactttcatttggaaagttcacatgtctaagcacttctctaagaactactgtaccctcttctccgctttaaagcagaaagagggttgtacgaagtgctcttcatttggacttaagtgcattaatgcagttagttgtccatcattacctttggagttggattttacatccttgtactcttttgacaccagaggcatattaattatttctgagcacttctcttgtcaatattaatctgtacccttacacatatgacctgtgcggcagcaaaggttctgaaatgcctaccttttgactggggctgctgagtggtagtaactattagtaacctcagcatttggatgattactatgcaaaaatgtcaaggacctgtgtgctctctttgcataccatcaaggctactgagtcccagaattaattgctaagttatgcgtatttataactatgaatgtctggaatattttgtcccctttacattattgcagaggttgctgagcccccgaaactacccggtactgtcaatgagcacaggggctctgacgaatgacctgctctcttccttaaactgattttgggactcttaataggcacaatggcagttctggatggtttattttctactccaacttgagcaaatcccctgctagtttcccaatgatataataaagtacagcagtatgtacacccaacaatgacccggatttcgaccctttttgcattgctttaatatatacaatcctaaatagtcacaatctcacactttatagtgttccttttgcccggcctctagtttgtccattgaccacttttctgaatcactaattctcacaaacccatcattaaggaagagtttgtgccctttctcaattccatcatgccatcccttttgcctctttgtttgaacagtattgactgggcaaagcccttctcttgacttaaagtcaacaacaccagtttactcacttcatatggctacagtgtctcagttgccttctccttgctcccactgaacagagacacctcgaattcttacattattctgggtaatgttaattaccccaaacaccctatgtgtcattaataaattttggtgtatttatacactgaatagcaaaagcaggccaaaactaggtggatgagccttcaatctttaacttgcacttctaaattattccaattccaactgctggcacattctagggccaggaaccattcttgcctacctttattaatgctttattgtgcaaaatattgcaggcaagtagctcagggagttggattgccaccttttacttggggctttcctttacagtatgaactgaaaattgtcttcctgagaaggaagcttagcacttttctttccattcttcctccaggaaggagccaactgtctgcttaagaaactttaagcccgattttgtatattgctactgtacaggaccaactgccagaaaagttattgataattttattccttaagaaaggcatttggattgcaaggtggattgactgtgagatcattagcttttgtgaagtaaaaatagccatttgtgtcatgtttctgaagactaagcagtgtctcagtgtactgagggtgatgagtctgtggaaagatcagtgcaactattgcagaatgtttaagacaagtatctttgcttggtctttactacaagtttaacaaaacgaaaaagtcaatctttgtgtggcctttagtatgattaactttttggaagatgacctaagccttctaatcattatattttgtctgacattggtcaccagtccttgcttatttttaaaaggtgactggatggattaaatttgagaacatgtcaagtcgcctttgaaaattatataggccatcacatttaattaattcattctatccaccattaaactctggcaataatttgaagtagcttgaaaattcctaaagtgggaatttattttagagatgatagaacctgtttccccactttacattttaaaatatgtctgccaggatctaatcattcctttaaacgtacacttcaaagagagattttcctagtaagaaaagagctttctctagtgtgaagggtgctttgtagccgccgagtacttaggtcttttttgggagctattgtgtatgagtgtatgtatgtgtgtgtgtacatgcatgttgctgcgcgcagtcattcattcacatggtgctcagacaacaatgggagctggttcgtctatcttgtgggtcctggagatcaaagtgagatcatcaggcttggcagcaagtgcctttaccctccgcgtgccatcttgccatcccgctgctgagtgtttgatatgacattgctgatgaaaataatcatcacaacagcagttctcccagcattactgagaaatgatactatttttctgaggaggatgttcaagtaactcatccagtgcaggatcctgcttgaactactgctcctccgttacatcagactctggctgtttagactacagtaagtactaccttgttagctactaagctatctttttctcattcgagtttctttctgtgccacccactgaaaagtcaaagtgactaataagtcactagctcttctcagcttatccatacacaacacatagtatgccaacgaaattgtagaattaacacattgtgtacccaatcgccattatgctggggtacactaaaatgagaagcgatgatattttacaaaatttcttccgtgagatgattatgttatttaagacttaatgtaatataagcacacttgagatcattttaggaaatgtactgcctgtgtgaattgtttaagtattttaggaagtctactggggttgaaatttgacttcttaaagagggaagtgtgcttactttgccttgttggtccagacgactattagtaccatctggttggtttatctgaatgccatctgtttctatctacctcttggaagcatggaaagaatattaagagtgaaagactccatgcattatgcttagctgtacgccaagggtagcaagagatgagcttgtgtaggaattgggaatataaatttgataatttggttctttcaaccatttttactgcatttctgcccagaacagaccactggacggcactaacagcttagacagagaacttcatagcttacaatctttttttttttttttttttttttttttttttttacaaaagtgcaaagaaggataagttttatgaacaaattttactatggactactttatgtaccctccttgctcatttttctttttcattaattaatcaattaattttgttttgttctctgttttgttttgtgacagggattctctgtgtagtctggctatcctggaactcaaactcaagagatccgcccgcagagatccgcccgcctctgcctccagtttagagtgttgggattaagggtgggtgccacactggacccctgccagcacttttcaacagatactttcagttaaaacaacaaatacttgactcctgtgtagaaaatggtctagctgaaaaaacatccttgtccataacacttaacatttttttgcatttgccttttgtacgtgcaaatgaccctctagtactttaacccttttaagtccactgtaaattccttcgcagcaggtttcccccaactccaaaggcttagcattgtctggctctctaggtgataatacatctagaactattgagtcttttaggaaactaggaccattgttgtacaagtaactgcttcaaaaggaaacatttgcaaggaaaaaaagctttttgagatgctaaagaatgtgtttggtgcactaagacagttagctaaagcttcggtctcaccttagcaccattggctacccaccccagtacatgcaaagtgaccccccccccaggcttgcctaggcacctagagctttcagcctgcctcctatggacctaaatagagattaggactcagactccagttagtggcctggaggaagctggtactgctgctattcacagtaaacccactatcactgacagttccctattgaaatgatcaagttgtgtgagcaggcagatcattaatcagggccaattctgtcatggcaacctagtcctacatgacctccacggcactgtaaaatacacacttatttgtagtaggacatctggaacatgagcttgtctgtgattgaaatgtccattaggaggtgccatcacacaaaaccatctggaggccatctttggtccccataattgatggaatacaaagagttccccaaattagtgtcctgacccagccctcactgtcagtaatcatgtaatggaaagccaccaactcgccatcaccatcttcaggctgcctgaactgtatacattaagaatgagctttcagccgggcagtggtagctcgagcctttaatcccagcacttgggaggcagaggcaggcggatctctgagttcgaggccagcctggtctacagagtgagttccaggacagccagggctacacagagaaaccctgtcttgaaaaaaaaagaagaatgagctttcttccaagctgtccaatggcttgacccagacttaggagtttgtaaacaaagaaccctgtagaacaagtgaatttgagaatgtacaccttcattaagtggtgggaagtggaagtagtggattttgccagctgattttacaaagccctgtggcagaaccagaccaggtctttgtatgcatactgccatataacctagccactgtccaacctgtgccctctctcccagtccagtgaacctcttctgcctgccccttacttagtcctctggctcatcccaggggaagatggctctatttgtgtagtcataagaaagttttgttaattttaaataaaacaggaaaagagaaagctcacttaagacgagagctggagagatggttctgttagtcttccagaggtcctgagtacaattcccagcaaccacatggtggctcacaaccatctgtaatgacgtctgactccctcttctggcacacaggcatacatgcagatagagtactcaaatatacaaaaagggaaaagaaatgaaaggcctttgaaatgtagacatgctttcaattttaaaggctgttttcacatctcttaagaactaggggttccatgagaacatatcctcaccctgagttcttaccaccaattgaaaacgctgacatgtgcatatgaagattgtattgctagtaatcaaattatcatttgtagagtttagtataattatcatttgttttccagggatgaatttggagtctgttttgtgctcctgcctcaagaagaaggattgcctggatttagaggagtgaagagtgctggagagagcccaaaggtatttccgttacttggttgactgagatagtatcttcccttaaaggtctaatgtgtcaagttatacctcctaagtaaatacctcattattttcatgtggaattttcaacaatttttgtagtctaatgatagccttgtatttcttcacagggacaaacaatccctatgtgagactcaaggactgccagcagcctatacagctacattacatctcagcagaacttctcttcaagtcctcgctactctgaacaaaaagcttacaggccacatggagaaaaaaaggtactttggagaatttgctatttgggggtttctatctgatctccagttcatcagagaatgagggggcaagtcaataaagcactccccatctcctggtcccctggcatagtcagttagccaatgagatccttgccttatgatgaggccttgaaatcatccccaccatgttatgaccaatctgtaacatttctgctctgaaatgcctaaaaggtaggttatcagaggaatgaaggccagtttctgacaccctagtcttttgtacttgatagagtaagtagatatggctgttgtcacattctgtaggcctgtcataattctggtctctgaatatcctcaaactcagaggtccaatgctacaccagtttctagggacatatgcaccataagcactgagccaaacaatgctattcaccttgccagtgttctggcatggtattgtttaaagcacaaattaaaagaagaaaataatttaacccctttattcccagagtatttgaagtacaaggactttaacacaacctataatctaaaggatctctcattggtaggtgacagaataaaagccagaaagaacttggatggagcaattctcatgtctctaagttaacactaagatctacaaatgtgaagggttcactctccaagcccctccccatgatttaacacaactgctggttactacataatgagacaactttcccagtattcttgatttcaagaattggcttttctttcacctcttttccagatctccccccagaattgtgggcttgctgctttgcagtgctggcgacctattccctttgacgatccctaggtggagatggggcatgaggatcctccaggggaatagctcaccaccactgggcaacaggcctagcccagatttcagtgagacgctttcctgaacccagcaaggaagacaaaggctcaaagaatgccaccctacatcaaagtaggtaagttttctgcaacagtgtaataattttaactttgatcttgttttccattaaagtcagccttttacttgagatatatacataaattttatctttttcccacatctgggaaatgtaactaaacagtgcaaatgtttcttctaggagaaaagctgctgcaatagtggcactgaccttcgaggaagccattctgctctatttggttctctctccagaagctaggaaagctttgccagctgtttacatacttcaagatgcactgctaccctactcatgccatataatacacaagtgagtagcttatttacctacctagctatttacgagtacactgttgctgtcctcagacacaccagaagagagcaccagatctcattacagatggttgtgcgccaccatgtggttgctggggattgaactcaggacctctggaagagcaataggtgctcttaaccactgagccatcactaacattactgatgatgaatgcctctaactacaaatggaaacctggctggaattgatacagaagtatctatcattaggcagaatttaaagagccaggatgttctagtacttctttcctggcattcatacagcttcttttgttctttgtagtgccatctaccaaatattacccttccccaaagcagcacagaaaactgggtcttcagcgtgatcaagcaatgtgaacacacaaaaggaaggcagctttataaatgacccgaggatcaacatgcctgactgcagcatcttaaaagcaatagaatgaggtaagtcactagcattgcagtcttctgaggatttgcatttgctggaagatggtgctgggtggagagcatctaatgtgataatgtgaggcagggccatgtacacgatggaagatgaacaggctttcacgttatcaaatggcctcacagcagcaactcaaactattatctgcttaccagttatatcacaagaggaatttagcttctaggttttgttgttgttgttgtttgttttggcttggtgccctaccattcttacagacttaaacattgaaaagctttaaatagtttatttcttatctccatctgtgaagcagccattagacttgtgaaggatgtaaaaaccaagcccccccttttttttaatagaagaggagagtgaagctgacaattaaatatgcagtcgcttatagtgtttgctgcttacagaagcttttaatccatgtaacagaatgttgagatgttcattctgtgtttaaatgtaatattccctagatgtatgccctttggcaatttagttctgctaagacctgtctgtttgtgaaggtcaaatgaaatcatgaatggaaagtgttgagtacagagcctggcaaatatgccctggagttgcatgactaggccatttggaagagttgacgggtgtgtcctatggtcctatgttaaggaaaccttaagtttaacgttgatagcctggtacagtgtactaatggcaatttttttctttgcccttccctgtttcttgttaccctctttctggtggtctttgcttactatcaatcattagtgtgtattgtgggtgtgtctatttcttgttttatgtatctattttttccttggtctgtgtgtctaattctttgttacatctatttcttccttgctttgtgtgtctatttcttccttgctttgtgtgtctatttcttccttgcattatgtctaattctttgttatatctatttcttccttgctttgtgtctatttcttccttgcagttgtgtctaattctttgttacatctatttcttccttgctttgtgtgtctatttcttccttgcattgtgtctaattctttgttatatctatttcttccttgctttgtgtgtctgtcttccttgctttgtgtctatttcttccttgcagttgtgtctaattctttgttacatctatttcttccttgcttttgtgtgtctttctttcttgcttttgtgtgtctatttcttccttgcagttgtgtctaattctttgttacatctatttcttccttgcttttgtgtgtctatttcttccttgcattgtgtctaattctttggtatatatatttcttcattgctttgtgtgtctatgtctccttgtgttgtctaattcgttgttgcatctatttcttccttgctttgtgtgtctatttcttccttgctttgtgtgtctatgtcttccttgctttgtgtgtctatgtcttccttgttttgtgtatctacttcttccttgtgtgtctaattctttgttacatctatttcttccttcctttgcatgtctccttctttcctttgtgtgtcttttctgtctgcagtgtgtcttacctattcccatgtttctcctgcatgttctttcttgcagagctttgagctttgtttcactttctctggtgcctgtgtggtctgctttgtcttcactagctatggctctctgttttatctatctggttgctatttctcttagcttttctttcactcctgcctttcgtgactcccctttgggtcacatgttgcatgcatccctctctttttcttgtgctcaccccacttgttctttgttcaagttctctttgtcagtccatttcagttttctttctgctgcttctatccttagtgaattcttgtttacatttcttccctgcctttcttgggccactttctctgttttcttttgtatttgtgtctctttgctattggtggatttcttatctcagcatcattctgttgctttgtgtttgcttgtgtttctatcttctactttcctcctttctgttcactttgagcatttcatctctttacaagtctgtgtctctcttgtattctaaagtaatcctttcttggatgtttctttgtatgtacatgtgcgtgtgtgcatgtgtgttatgtgtgtcatgtgtgagaggagcttcatagccccttcccaataggtccagaatgtcacccgtggagccgttcctcacaccagactgccctgagaaataatctaagacaaaatacatcattccgtccggtcaggattcaagtggctctgaagtgaacgcccaagtagaagacagaagttttgcgacttgagatttaaaaggaccaaaatacacagatggcccgtcttgagctggctggacagaatgctgacaacccaaagaagaggaactgtttctacaggacacctgtgacttccaagagcggggaactacgtatgtcataagacacaaaacctgagctaagtccaagcataagacctaaggacccaatcctatatggacagaatatttaagagataaaggcctatggcccagaactctggaaggatatttctatccttctatccccaagaccaagaagggaaattcgaagatgagacctgccccccaaccccagcatccctttccatttcttatatttctatttaagctgtcttcacttgagatgtaatttttcattgttgccattgcccataaaggaatacgtttttagctggatagtattgtgcaagggtctgttttaaactgggtcttagccatttgttaaattgttgatgttttacaacttccatttctcttcacatctgctccacttgagacggaactaaatccagccagtgtatatagcctgactattgaaacttccctaggaataagcatgcatacagatatgcatactgccatcctccctacctcagaagccctaggctgacaagaaaaggaaagcatcaggttgttagggggaaaacaatgtcaggctatctagagaaaatataaagagttgttccagaccaatgagaagaattagacaagcaatatgcagatgtgccaaccctctgagaagcaccagccagtgtcaccttctttctttgggcttaggtgagcagggtatggttttctaataatggtttggggacaaaatgaggtctgaactccctgctcatagtagtggccgagtaatttggtgcatttcaccaaaggaactcctgggtctaatacctacctttaaaattaatgatgagagactctaaggactacttaacgggcttaatctttttcgtgccttcctcttcctctgtaagagggaagttaaatgacacaggatgaaaaagtaacatgctcatagcacattggcaattatacatggttattatctgaaagtgtagagcttttcctataaggcatcagactaagtacctgaagctttgtgggttcatggtcttagttgcatattccttagttgcaaatccttttcaaaaggtaagaaaaaggcacactggtctattgcctgtacttgatcaagccctgatatgaatgccagggaatgtctgagtaacattaatttccttccctgcatattttttgtgctgaatactaaggctgtgatgcttcactgtggtcacccccaggtaacaagatattaccaggtaaccaggaaacgtatgaatacgtaaaccatgaagcctactgtaacttccaagtcagtgctgagtatgtattacatagtagctgaagtctacgcctctgtgtgctataggcacaaagattgctctaggaataacatgctttgtaaaaacaaatatatgaacataacggggcttgaatgaataacagtccatatacttaaggccagtgtgtttcttctgctttggtgaggctcagtaagttatattataccaggtagcagaagagaaaacacatggaaactgattttaaactacaaactaggtcactaatgcaggtgattgattaccctattctgatcaccttctaatttctgaatacccatgttcagcactgggaataacaaagggggacattaccacagaactagaatttacaaaagaatgcattaaataaagcattatacagctatcaattgttccatgtgtgcaaatgaatgactactaactacctctgatgtatccgatattgttttgggtacatgaaatattcatgagtaactgccatgaaataagaatgtttgcattccatactattcataaggaatgagccaatgcttaatttaatcagtcaaaacttgagtgataagggcatgttaatacaagaacatttgcccaggtcacattatggttgtgggtactttcttaactataaagcagttcagtagtataagacaagacaaattttctatagaaataaagctgcctataaaataggcatagtctctacaaaattttcattgtactttttagcccataatgggaagagtacagttaacaagctgggtgtggtagcatgtgctctgagctgaagcaacaggaccacttgagcccagaaattggaggctagcctgggaagaccataaggtcaatctcaaacctggaggctaaatattgtctcccatgtgtatattctctttcatgggtactggagagatacacagacgtacatttcagtgtgtccacacttgagaataatatgtacgttggcattttatgaactcggaggtaccatataaatgtaacaattcattttcttacttggtatcaatttccaggcttttaaaattctgccacatttattatactgtgaaaataaagtaaataagtaactgtgaaccactgaatatatgaagcattcaatacttgatgagtacatactgaatggcagtcatttattacaaaacagtgcccttgctaggcactgggatgcaaagagcattctcattgtcctgtgtatctaaagaaattatgcatgagattaatttataatttgtaaactgccatatatatgtgtatatatgcaatatttgcctggtgtgcaatgactttgcttttatcccaggcatgcacaacagatctgtgtggagctttgtgaagtctacagttctataaagccgggacctaactgttggctttatcagtgaacagtgattactttctaagtttcataatggctgaaacttaatcataatgcttatcacctaacaccacctaataataattttaccatgctatgtgttgagcgaacacatagattgctttctagcattatgtagcacttataggagtgaaatctagaccaaaacttcaattcacttcaatgaggaaatgaaaacagaaaaaaaaaatggatttgtgcaaggcagtgtgctaaatgttacactgagtggactatgctgtctaggatacttcccagctggcttgactgaggaggtggaaaaggttttattaatgacaggaactttttccatccagtttcttaaatgtttgttgaatgctgctgccagagatgaattacaaacaccttgccagtaaaggagttttatagggccagagtgagataatcccagagcatgggtatcagggaacaaaacgggaagaggccagagcatctgatggcatgtactcagtgtggcccagaacctctcgaactagatgtactggctggagggaccaagcatgcagaacacaacacctaatgaaacattgtatataaaatatgctaacctaggtcctaaaactaaaatgtgaggtggacctagtgtagatcactgatcataggagacatggtctcataaagcccaggctggttctaattggtgactgtcacagcttctcaagtgctgagattacagatgtgcttaacccatgcccagcctgaagaatatatctgattactgagtgaataatatttttaaagaattatatattttatgtatatgagtacgctgttgctgtcttcagacacaccagaagagggcaccacatcacattacagatggttgtgagcccccatgtggttgttgggatttgaactcaggaccttcggaagagcagtcagactcttaaccactgagtcatctctccagccttctgagtaaatattttaactataatggctgtttgcgaaacccaaccaaggccaagattccttcaacataaactggagacttcctagctaaggaagctccaaaagtcattttctcattggcctagcttgaagccaggacagacttaaagtctgtcctttaattcattacccattttccttttcttactgttgaagtgtttcaaaggagaatcaagatgaatcgataattctaaacgtatttgttcattgcctggctcagcgtcatgtgagcaagaagaatatactatcacactcatacttttaacttaagtgtgatgaaagtgcagttctaagtactaaaatttctaagtactgaaaagaacaaagacatttaaaggatgcaacccaaagtgtactttacctcagtagtttctgaggggactgcagtcacaccttgagactacagctctcactttagctgggaaaaacatcaaggtgtagaggaggcaagttaaataaaaagttgctcccctcctcatgggcatgcttggtagagtggaaataataaaagaggttctctatttcctcggttccacacattgcagaagatgctactggatgctaagtgcaacacatttgttccaaaagggcactcagtgtgacttacagatgccccggaaagcagagggatgctctttattaaacagaaatattagctcaaacgttttctagactgaagaacactttcctcatttcccacagtttgcctcagaggttgaatacaggaaggttattattcattcatttgctttattggttcgcctgttctacaaggatttgcatgtctcttaggccttcacttggctcctgagacatggaaaaaggaaacatagacatagggaagtgctggatggggggggggggtctcttttctgggtagtggcacgacttagtccttagtccccaagtaatatgcaatgtgagtcctcatcctcatgtcttctccggccactgcaatgagtgggaagctgggctttgtagcaagcctgaccctaaagttacagaagccctccacgctaagaaactcaattttctaggccattttagctatgactgtgaccactactggtcaggagggatgacagccatctaagttccacaatcttaggctactttgcattatcctggggcaaacaagccatttttgagctgcagcaggctttgaaatacattgaccaattttgcctgtgttcgttaaaccttttacctttttacatgctaatgctcacagtaatttagaaatgttctccttactataatatactcaaggtggcttgctatggtaaaataatgccagtggatgaaaataacattaatgtttaacattcttgcataaaatttaagaataataaaattgacaacaatcagaaaactggaggaacgaaagaccaaattgaaagaacttgaaaaagattaaaaatgcctgtgctttgaccctttccatttttctttcactcacagagggtgggacaggaggccgagtgaaggaaagggtccagcctgtctatctggaatctaagttgggactttaatgcagttccacaaaattggtattaattcgctaaatgtttctgaaaatgtattttcatctaaatggctatcagctaagccttgagtcaaatgggaatgaaacagattaagtcaatgtgatctctttatccaagttgccttagagctgaagtcacaatttgctgtaaggaagcttattcattgtagcatacgcatactttcaaagtatctagactttacttagtaacccaatcaggacattcaggcaaaagaaaaggaacagagaagatggagccaggttgaagaggtctgggagttcaaacaaatttttttcattttcattaaaactcaattgggcatcaaaagtgttactaatattagcttttaattagtggaaattggctggattcagtaatatccctttgtatgggtaggaatgggcttacatttctggaatttgcaaaggaaaaaataactgaaagccttcctttcacagttactgccatcaatattgctaccaattaagcacatcctaccatcatctgctttgatcacataaatgaactgtgtaccaatctgttgttgaaagactggagtcatcttcccaccaactgtgaaaaaacacatggaaaacacctggactttgtgaacggatgcggaatacagaacttctgttgactcttgggtgttttgaagacttgaaaaaaaaaactgttgcttaccaacatgtcacaatgagtccgtgtgtgggtgggtggatgggtgggtgggtgggtgggtgggtggttgagtgggtggggtagtttgctgttaaataaaatgctttgttttgaaaacatcatgtgctgtatatgatattttccttaaattttatttaatgtgcatgagttttgtctatgcattaggtttgggtgttatacccgtgtaggccagcagagggtgtcggatcccaaggaaaccaagttacagacgccatcttgtgtgtagccggaatgtaattcagatcccctggaagagcagttagtgctcttaaatcagttcaccttatgctaatacaaggagccaacaaaaccacaaaagcctcatctacaatgtgattggcaagaagagaaagatagacaggtactgcaagcgagtgtgagtgaggcaggtacaagaatctattatggtatcttaaccactgccacattccccttttcctttgcatggagccagaactaggctagcctccaagtccctaagtagccggaatgactctgagctcctgatcctcctgtgttagaattacaggcttgtaccactaagcctgcttttcagatgatagtttctaactcagtggcccttttatcataccagatacctcagttttaattccctatgtaatgaaattggttatgttgccctggccatctggctagcctgaagtccatgtagattaggctggccctaaatccatagagcactgtctgctactgactcaggagtgctcggattaaaggcctacaccaccaggcaggcctagccagttccttgggtaatttgaggtctcataacttagagcctaagttgttcaggagaaagattatgagaacacaaatctaataagatcacgagaagcaaaatattgaggctcaaaagtgggagtactggtaagatgaaatgaaaagaaagaacatggctgtcaagaagtccttgaatagagaaaggggcctctgatagttctaaaattcaaagtgacaaaattgcgtctaggagaaaagataaattctctcaggagagagtttgtactgttagacatggctctgcctagccattgctaaccagtagaagtgctccaacaaaaccgggccttcgtttccatccaatgaatgggccagaaaagcaacaacattttacctgaaatcagttcaccttatgctaatacaaggagccaacaaaaccacaaaagcctcatctacaatgtgattggcaagaagagaaagatagacaggtactgcaagcgagtgtgagtgaggcaggtacaagaatctattatggtaaatcttaacatctttggaaaatagcattggcccaactccaagaagcccatgaaaccttaccatttattactggcaactaaaggattgggacacagggcactcaaacgtatccactgatgagtatttaatagttccaaactatgtctggggtgaactatgaaacactaaacaaaataaaactagcaaatatgacagagacattttgtaaggaataaggggtgctggccagggcgggagggaaattgaaagtggaagagtaagcagaatgcattctatatacctatgaaaaatttctaataaaaaaccctatttaaagccgggcgtggtggcgcacgcctttaatcccagcactccagaggcagaggcaggcggatttctgagttcgaggccagcctggtctacagagtgagttccaggacagccagggctacacagagaaaccctgtctcgaaaaaacaaaaacaaaacaaaagacctgtctgagctggagagatgatggctcaggttaagagcactggatgctcttccagaggtcctgagttcaaatcccagcaaccatatggtggctcacaaccacctgtaatgggatctgatgccctcttctggtgcgtctgaagtcagcaacagtgtacttatgtaaaacaaaatgttttaaaaaatagaaaggaagaaagagagagagagagagagagagatgctctcataaacaacgtggaaggccagatgcacacctgaagttgtcctctgactccattatgctctgtgcaaccctcacccacaaacgtgtacacacaccatccacattcatatacaatacgcatcacacaaaagaaggaaggaaggaacgaacgaaaaagagtcaagaggagggctgccagcatccttgccctgatggctagggtcgctgcacgggtcagcagcactggactccctcgtctgactgtcaccctggtcatttagaagccaaacactgcgattcttcaaaggcgggatctgggctaagtaaggatgtggctcagtggtagagggacagccagggcctcgaactcagaaatccgtctgcctctgcctccggagtgctggggattaaaggcgtgcgccaccacgcccggctttaaataggattttttattataaatttttcataggtattgaagaggcacacatgagccccttcatggtttgctagaataaatgctcttggtgatataacttggtttcctcagcctgggttcctcaactagaaacaggcagttaaggtccaaggcatgagttgtgagctgcccgggtcttccaggcaacctgcaagtgacaggttcttgctatgcatgggcatccttattccccctgggtgaggagctttggaaactcaggggcagggagactccttctgaggcttctggaaagagagaatagatgtgaggatcaggtagaagttcccagactgtccctgccatccaagagggaggcaggagctgggctgggtatgggtcacaaagccagcagctgctagcactgagggtccttgcctttctgtcccatggcccctctcccatctgcactgtggttgcagagcctgagccagcacttcccccgactggagaatgacagaggcagagtccactcctcccattccggggcgggaagccaccatgttgcacctgggcccagcagggcctgggaacacgaggagcccacggcacccaaagccctcccctcaacccaggtccttgcgcaaggtcaggagagggcaggcaagtggccattaaaactgccctcccggcacaatggcacagtgaggtgaagctggcacaagaataaagaagaggaagaaatagagctgtagatagaagagacagcaacgtgtaataacatggcgccttcaagggtcaggaagggctattctgcaagtaatctcaggttaattagttcctctgtgctttactcgaaccaaaatttgtctcctatcagggagagaaggtggagtggataagattaaactaagcacacacagagacaattgtttttgcttttgtttttctttcatttttgagtcagggtctcacattgcagtcctggctggcttggaagtctctggcatactgctggaaacccaagcactcaccctaaccaagcactcaccctaaccaagcatgcaccctaaccaagcactcaccctaaccaagcactcaccctaaccaagcactcaccctaaccaagcacacaccctaaccaagcacacaccctaaccaagcactcaccctaaccaagcacacactgtaaccaagcactcaccctaaccaagcactcaccctaaccaagcacacaccctaaccaagcactcaccctaaccaagcacaaactgtaaccaagcactcaccctaaccaagcactcaccctaaccaagcacacaccctaaccaagcacacaccgtaaccaagcactcaccctaaccaaacattcaccctaaccaagcactcaccctaaccaagcacaaaccctaaccaagcacacaccctaaccaagtacacaccctaaccaagtactcaccctaaccaagcacacaccctaaccaagcactcaccctaaccaagcactcaccctaaccaagcactcaccctaaccaagcacacaccctaaccaagcactcaccctaaccaagcacacaccctaaccaagtactcaccctaaccaagcacacaccctaaccaagcgctcaccctagccaagtactcaccctaaccaagtactcaccctaaccaagcactcaccctaaccaagcacacaccctaaccaagtactcaccctaaccaagcactcaccctaaccaagcatgcaccctaaccaagcactcaccctaaccaagcactcaccctaaccaagcactcaccctaaccaagcactcaccctaactaagcatgcaccctaaccaagcactcaccctaaccaagcatgcaccctaaccaagcacacactgtaaccaagcacacaccctaaccaagcactcaccctaaccaagcactcaccctaaccaagcactcaccctaaccgagcatgcaccctaaccaagcactcactctaaccaaacactcaccctaaccaagcatgcaccctaaccaagcactcactctaaccaaacactcaccctaaccaagcactcaccctaagctcagttccaatagaaagaataactaaaagaattctgtagacaagggagggctttctaggtttaaaattaatttactggtccctaaaaaacaaacaaacaaaggggctggagaaatggctcattggttaagaatgctggctgctcttccggaccggaccgtggttgtggttcaattcccagcacccacatggcagctcacaactgtctgtaagtccagttccagggtatctgacaccctcatacagacttacattcaggcaaaacaccaatgcactaaataaatacatacatacacaccgaacaacaaaagactacaggtctgaaaaaagccagtaggcattgcaagcctggaggtggtggaccatggatcagaattcaaggctgggctgggctacatgagagcctttaaaagtaagtaaataaacaaggccttattctctattcccactagggaaatgaagcaaactataattggatatccctcgcatctacctacttggaatagctatctagaacctaggaaccagctggtgttggaggcaagggcctgtaaccgcggcacttgggagatttagagcaagaagatgaagaattgggtctatcctgggcaatgtcatgagactctgtctcaaaaaaaaaaagaaagaaagaggagagagagagagagagagagagagagagagagagagaggaagaagaagaggaggaggaggaggaggaggggggaggggaggaggggaggggagaggagaggaggggagaggagaagaaaaagaaaggaaggaaggaaagaaagaaggacaggagagctggaaagatggctcagtggttaccaagaacatttgctactcttctggagcccctgaatttgttttttgtttttttaaaggtttatttattttatttatattagtacactgttgctgtcttcagatataccagaagagggcaccagatcccattacagacggttgtaagccaccatgtggttgctgggaattgaactcaggacctttagaagtacagtcagtgctcttaactactgagccgtctctccagctcctgaatttgttttttgtttgtttgcttgtttgtacgttttgagacagggtcttgtagcccaggctggtctcaaattctctttgtagataggatgaccttgaatttctgacacttctgccttgacctcagtgctgtgactacaagcacacccctcacctggtttatgcaggttccggatggaacacagggcttcaggaatggcagagaagcaagttacctgactcttgctcagccattttgaggctataggaggagggggacaccaggcagtgagtccccatgtcaaaaaataagtcgagccaggcagagagggacgtgcttttaatcccagcacttggcaagcagaggcaggtcgatcactgtgagtttgagaccagcctgggctatactatatagtgagccagccagggctaccctggaaaactctatctcaagaacaaatcaatactgtactctcctcgaccttggccagagaagtttcttctgcaaggaggagcagctaatgcagactcagagctggcctgagactgagcaacaattgcatgcttagctccaaacaaggtgtctatagcaacccacacactgcccaaggcccatggaacatcgtggaagcagggctggaaagaacatgagagctaaagatggggaggcaagctgtgaaaatgctggctgccgccctcacaagcgtactgcggctgtggctacctgcatacgattccgacaagattagccaacattccagcaagcactgctaactggactcacagggttgttattattattatattattattattattttaaaaggagacctcattaaggttataggaagacagcttcgggatgtgtagggagtgggggagaagtacgagtgaatgcatgtatgaaattgccaaggaataaataaatattaaatatagggaaaacccaacacttggaaggtggaggcaggaagggcaaggtcagcgttggctacggagcaaactcaaagccagctgtactgcatgagactgcgtctcaaaagaacaaaggtggaagaagagctcagcagttagcagcacatgttgctcttgctgagaggacctgagtttgctagcaagcacctaagtcaggtagctcacaagcctctgtcactccatctccagggggccaatgcctcagacacacatatttaaaaacaattgtgagcagggtgtggtgccgcatgcgcatgcctttaatcccagcactcaggaggcagaggcaggcggatttctgagttcaagtccagcctgatctacagagtgagttccaggacagccaggactacacagagaaaccctgtcttgaaaaaccaaaaaaacaaaacaaaacaaaaaaacaattgtgtgtgtgtgtgtgtgtgtgtgtgtgtgtgtgtgtatgtgtgtgtgtgtgaaacaaaacgaaacaaaacaaaacaaaacaaccctactttcatatttttaccactggtagtaaaatccaacactaaaaggaattcctggcataagaaatcttgaggatgaaaagtcaatttaagggtatgtttgaacatagcactctgataaagacaccatccacccatttgtctaaagtgagttagtcttcccaatcaaatcctcacttatgccaatgcctgccttaaatgttttctatgtgtagtctcctcaattaccatcaacattcaaaccatcactttcccctataattccatttaccttggactttcacttccagccttattctaatttcttgggctttcatgtttattcgtcaactttcattttcattatacaaggacctgataagtttttattgataaaagttttattatttgctatgaattgaatgcggctatgccctcatgtgtgtgtgtgtttaaatagtaagctcagatgtttacttaaaaacaaaacaaaacaaaacaaaacaaaaacatgtgttttctagccaagttggtcaggaactgactgtgtagcccaagctagtcttgaactagctgcaatccctttctgcctctgcctttaaagtgctaacaagtgtgagccacctgcccagctataactactattttttaatgtgagcactttctgttctcacagaggacctggtttgatttccaacacccacattgtggctcataaccatctataactccagttccagggatcctagcaaaccctcttctgacattggtgcccaacaggcatacacatgattcacaaacatgcaaacaagcagaacactcatacacgtaaaatctaaaataataataaagtagacctatagagtatatataattccaaatggatttcagtagaagaccctacttacattgcacagaaaaagctgtctggctgcttcaggcatgccaatatcagcacatgtaaacaagcttccaactttgtttttgagtaatcaactcattattcaccagatctgaggctatttctattcaacagcacaagaaaagaagggagaagcaggaggatctctgtgagtttgaggccagcctggtctacagagctagttccaagacaccagggctgttacatagagaaatgctgtctcaaaaatgaacacacacacacacacacacacacacacacacacacacacaagcgcaagaaagaaaccattcgaatttgactgcatatgtacataaaacctttaaataaaagacgtaatttcaaatcaaatgaggtcttaagaatggagcctaaacctgtctgtctctttaccagacgcagggcagccagaaggcagccattcacaatccaggaagacaggaagggataacaccagaacccaacctccattttagagaggtctagcctcttgagctatgacacactatttgttctctaactacccaaagttgtattttactatgctaattagctgattaagacattaggtaaaggtgttctacaaagaaactgtaaataaaagacatactctgtgccttagcctatctcatgattccttttctggatgtcttcataaccaccttaacctctacgaagatacagagacacaggtagcactacagtgctgtatttgtttaagcccccaacaaacttggtggcttaaagcaacacagatctataaccttataattttagaagtcagaagttcagtgtgagacacctagttgaaattgaaattattatttgaaattaaattgaaattattccttctgtaagttttagagaattcatttccctgccctttttagcttcaaatttcttagctagtaattgccttcctctatgtctatagccggatgtagagtctttgtcaatcttttatccctgccatttcaatgaaacaacaccttaccttctaggggaatctttttatctcaaggtcgattgattagaaacctcagtttcttcctccaatgtaatatagtatattagtatattctggggagtcagtgtttgtctgcctactaacacaggtaagaatttgcataggtattacaaaatcagtactttgcaaatctttcttctcttccgaattgaaaactgaacattaatccaaacatggcggcagaagcctttaaaatcggcactgtcccactgaaggcagtggcaggcagagctttgcgagtttgaggttatttactgagaccttgtctcagaaataaggcattaaaaaaaaaacaaaaaacaaaattcaccccaaatccgcatcaaaaccaaagctgattgttaatttccctcctttctaaactggattcattccttagtgccattgtttgctcgtctgaacacactgaataaacactaccgggagggattttccgtgcctatagtaaataagaatatgatttttcagatacgaaccactgagaattgttttgccttgcccgccacccccaccccgaaaatactccttgtcccagatagtagaaacttaatgggttttcaaagcactcagattattttcgaatttcaacgataccagagatcgggtcattatgtacctcggaaataaacggaacgcagtaccaaaattttaggtctcaacttccaaggcttctcaaagaaagttatcgcagacttagttactcgttcttggttacttcacacgctaccagtaatttttccacttttctgaatctgtgccccccccccacattctttcatcaactttaatccaaacgcgtacaatcagaaaaccccactaaagcggaggtagaatcccattggtttttagcataatcacatggcgggaaaattgttaccaaaaaaaaaaaaaaagagcaaaaatcttacctgaaaaagacacgtgcggtgaggtagtattgctgaatttggcttgagcaatattaaaatattaagactattccaaagagtttttcggacacgaggctttccctgatgtgagtgtgtggattctagaccctgctacaagtcacgcccttaactttcttttccgctctagactgcagtttattacccacgccaggcttattgaacgctttgcatatctacctgtaacattttagccaaccatctctacgctatcccagacattttcatcacctctgctctgcccagcagacattttagtcgacctctaggggttggttataaggcagggattttagcgatctccccaggtccctggcggcggcaggcattttagtgatagcccaggtccccggtggcaggcattttagcgatagcccaggtccccggtggcaggcattttagcgatcttccagatccccagtggcagacattttagtgatagcccaggtccccggtggcaggcattttagtgatagcccaggtccccggtggcaggcattttagcgatcttccagatccccagtggcagacattttagtgatagcccaggtccccggtggcaggcattttagtgatagcccaggtccccggtggcaggcattttagcgatcttccagatccccagtggcagacattttagtgatagcccagatccccggtggcaggcattttagtgacctcccagatccctggtggcaggcattttagtgatagcccaagtcccccgtggcagacattttagtgacctcccagtaagcggtggcaggcattttagcgacctcccagatccccggtggcaggcattttagtgatagcccagatcctcgacggcaggcattttagtgacctcccagatccccggtggcaggcattttagtgacctaccaggtccccggtggcaggcattttagtgatagcccaagtcccccgtggcagacattttagtgacctcccagtaagcggtggcaggcattttagcgacctcccagatccccggtggcaggcattttagtgatagcccagatcctcgacggcaggcattttagtgacctcccagatccccggtggcaggcattttagtgacctaccaggtccccggtggcaggcattttagtgacctcccaggtccccggtggcaggcattttagtgatagcccagatacccggtggcaggcattttagtgatagcccaagtaccccgtggcagacattttagtgacctcccagtacccggtggcaggcattttagtgatagcccaggtccccggtggtaggcattttagtaaagtctcccagtcccaggcatccatttgagccattagtccgggaacgtggcatgtatgttagctatctttccaggtccctgaccggtagtctaaccacctgtaagggacagacattttaaattttggctccaggacccagcagacattttagttattcctccgttatgcggcaggcattttaactatcggttcgggactacgcaggcattttaccttcatctccgcatagctggcaagcattttaggaatctttctgctgcttggcaatcactttaaccatctcttccgctgtcccgcaagcacgtagccatcgctccactgtcctgaaagcactttgccactgtcccactgtcccgcaagcacttagccacctctcccctgtcccgcaagcacttagccatcgccccactgtcctgcaagcacttagccatcgccccactatcccgcaagaatttcagccacctctccaccaccccaacaaggacttcgggcacctctccaccgtcccgcaggcactttaggcatctgccctctccttagcccgcatctcacccaccgctccgctctggccacctgtctagctggctatcacgctcttcttccatcacgcgcttgccgcagccgcctcccgggagtggatgcaggactcaagatgcgtggatatctcggaaagtgagaacagagcaagggcgccgagcgcaagtgtgtagcgcttgcaggtacttttgggaccgagtggagcacgacgtagcgcctcaccggatcttgcgagattgcgcctgacacaagcgctgcactgagggtttgagggagtgtggggcgggacctaaggctcttgaggcgcgggatcctgctgagagggtgtggttagcacacttgaccacctgcgcagagaagagggggcagagcttaggggaacagagcatggaccttgtgggagtcacagaaaagaatggctgcaacctgagcccatttgcctttgagagctgggaaagctaggccagcaggtagcagcttgcctggtcgaatggcccttggtgagtgttggaatgctggaaacccagagaccaaagctgccaggctcagctccaacacagtctcatttgtttggtttgtggcagactgcctgcaccccaaccctttcctccccagtcttgcctcctcctgccccctctcttaaactcttacggtctcaaagactgggtttgagggaaacctactgtaatggattgatatacttctccttcaattgacaagagacttaatgtcctagagaaaaattttccttaaactgtacatatccaaatttcaaaaaatgtataacagtcagtatcaatgcaaactgagcaatctgcctaggtacctataaacacacaagatacctataaacacacaagatacctataaacacacaagatacctataaacacacctagatacctataagcacacaagaagcttatagagcaccaattagactggaacagaaaagaaaatcctcctgccacataataacccaattttcttttcaaagaattttttaaaaatatttttattttatgtgtgtgggtgtgtgcagagcccatagaggccggatgagagcatcagatctccctgcagctggaggtacaggcgtctgtgagctggtactcgagtgtttgggaatcgaacctgggtcctctgcaaatgcagccactgctcttagccactgtaccatcattttaaccccaatgtcaattttcagtccccaaagctttgctggtatgtgatacaaattttataaaagtagaaaatgaggagaacttctttgcaaagaaataggatgtagcccaagggaggaaacaaaaaaccctctgagtgaaaaaggcagattcttcaagtaaaatgaatacaaaaatccccaagaatgtgatattttggcaaaagccctctataccatccaggtctgaaatattaaaagaattagagcctttcaccaggtggtggcggcgcacgcctttaatcccagcactcaggaggcagaggcaggcagatttctgagttcgaggccggcctggtctacaaagcgagttccaggacagccagggctatatagagaaaccctgtctcgaaaaacaaaaacaaaaacaaaccaaaaaaaccaacaaaacaaaacaaacaaacaaaaaagaattctagcatctttcacatacaaaagaaagtaccgaggaaaagctggaatggagctctttcatgttcttccttgagttctttgaactgaaacaaatgatggaaaatggcttctccccagaagccatcaattctcagtagaaattcaagaagcccattcatgaaaattcatggaaggccacaggaagctgcacccaagctaatcacctacctttgccaagtatactgaaatagctccatgttcttagtatgtctactgttccgtgtgcttggcacaggtctgtaattgcagcacttgggtgtatgtggtagagagagacgtttcaggtgttcagggttatcctctttggcgatatagtgagtttgaggccaggctaggatgcatgagaccctttaattcctgcacttgggaggcagaggcaggaggatctctgactttgagaccagtctgatgtacagaacaagttctaggacagtcagggctacatagagacaacaatctgtctcgaaaacaaccataaaacaattgtgtgtgtaaaattattaaattattgagctttctaggaatttaaagctttaacagtgagatactttgcttttaaatatcaatgcccaattcattcatatttcttcaaatgaacgaaaatgaccagtatgcatatgttgttactggaatgcattctttttttacctttagaagatagaaagtaatactccaaaatatttaataaaatattttaaagatggatgctactagtgattagtattataagtagttgttaactgataacattgattacctaacaaaagttgactgtgagaagatagcatttctaggatgtacaggagaaaacatactgatttctagaaactatcaccaaattttaaaaataatatttttattaattctttgagaatttggcatgtgtactatatcacccccattcctttctctaaccccttgcagatccaccacctgccaccctctctcaacttaatctcctcattaaaaaaaaattacccacagtgtccaatttgtgctgcacgtgaatgcctggatgtgaaccatccactggggtggtgtgcctaccaaggagtcaaaaaaccgtgactgtccctctcccaaaagctctcaactctaaatagtgcttccttatgcttggaatggcgattaacacaagcttattcaggcagctacagttcacaagtacagcagttaatgtcctgtcctgaaggttttgttttgctctggtccggctttgcctatacatcacaaagtctgtttcttcttctgccatggtcactggtccttggggagaggggactgcttttgaaaatgaaggtcatgaatcgacttcaggaggcccattgaacttgtgaaacgttgtgctcaatatttgccctgtatatgctttgcagagaaagttttcttgatgctgagaatcattggtgtcagagataaatccacagtctgtaaactgttgactgtagctctctccttacttagcatatgggggatgtggttattaaatgttttattgtatgcttttcctattttgttttttggagtaatttttggcaggaaaaaaagtaataaaatgaagagtttgaagttgaaaaatataaaacagcaaccaaagggaaatactcactttagaaatgagtacattcaaatatacctgagaaatcattacattaaaactatataaagtaaagccaagtggtgatgatgcacacctttaatcccagcacttgagaggcaaaggcagaagcagagaggcagagagaggcagatgcatctctgagaattcaaggccagcctggtctacaatgcaagttccaggacagccagggctgttgcattcggaaaccctgtctcaaaacaaaacaaaacaaaacgactaaccagtcaacaatagataacaacatcatgccctgtataaaatacctacaagttaatgttaaaacacaagtcaatagagtaggggaaaggcagtgtgcatgtggggagtactcatatgtccaacaaaagtaaaaatttgccagaatcaggtgtttgtttgagggaggggaatctcaggaagcttgggatatcttgttcaactcatgctcctgcctccaccattcaagtgctagcagtataagccttcttttttatttatttatttatttatttatttatttatttttattagatattttctttatatacatttcaaatgctatcccgaaagttccctataccctccctccgccctccacccctacccacccactcctgcttcttggccctggcattcccctctactggggcatataaagtttagtataagccttcaataacaaacatgttcggccccagaatccccatattcaaagctctgtaatgtagcaaaaagtccacaagatggcgatagagacaaggtgctaggttaagtagaagaggaagttcaaggccctcttttccgcagggaaagtttgtgaaatttttcctggtccttgctctagctctgtctggtggaatgtaacaacgttggaggaagcagtttcttttttcgggaaggagaaagatctagggatatcacgctcattactttctacacttatctgaacgctatctggagtcagaaatcaaatagctgagcgcatttggatagcagtgatcaaaactctggaaagagaaagtatactgcaggggaacagcgggctgctaagtaggtgtaggtagtccctgctgaataaactaaagtagccaacgacttgaaaagaaatagagagatctgcagagaatttaagaggtttaaaaggcactgtgtacacatgtgctgattttggaacttcctacaaagctgcacgaatcaaaagtacatggaggggttggagagatggctcagcagttcaaagcactgactgctcttctgaaggtcctgagttcaaatcccaacaacaacatggtgactcacaaccacttgtaatgagatcggatgccctcttctggtgtgatctgaagacagctacagtgtacttagatataataaataaataaatctttaaaaacagaagtacatggaggtggatttgaaggtcagcagctcatattgctgatggagtttacttggagtagagtggaaaatgtggacataactgtgagtctgtgttctgattgttgcctcccagaagatcaactcagggcattaatgattgatccacttacatgaacttcctcaggcagacatttaaaaattaattatagtgttgttatctaggttatgacaacatagtcaaagccagcaaaagggatgctttgaggtgacgataggggaagatagctttgaaattttgtttctacgcattctgggggaactacaaagtcatctatgtgcccattactcaagtcatattcaggagaaagggggggtggaaaaggttgaagtccttaatctgattgtaaccagcttctaggttcacaaaggcagtaaggtgaaggacaggacaacattgaaaactgcctgcttgccgggcagtggtggactttaatcccagcacttgggaggcagagacaagtggatttctgagttcgaggccagcctggtctacagagtgagttccaggacagtcagggctatacagagaagtctcatctcaaaaaaaaaaaacaaaacaaaaaaaaacaaaacaaaaacaaacaaacaaacaaacaaacagaaaactgccttctgggtattaaaagtgtgtttcaacgaacatagagcccatctggagagatagctttgtctcccttctttttgaagtttcttttttatgtgttttggtaattaccagcatgtgtaccacctgcatggctagtaatgtggaggccagatgcttgagtcagatcccctggggctggagttacagacagctgtgagctgccatgtgggtgctggaaacagaacctaagtccttcataagatcagccagtgctcttagccactgagccatctcttcagcccctttgtatcacatctttaaggaaattctgtcaagtctagaaaacagacccccatggccacacacaacaaagaatgcggattttataaaaatttacacctcaaattccaatatgcaaacacacttcaagtaaatgagcaatgggcgtgtgagaaatctttggtatgggacaagcccacacagggtgtccttgcaaggacattctataggtctcagaactgagccttcgttatgctgctggaagccatctttatctagctccgttgagtgagagtttgcttgggaacagacctggtgataattatgtaacaggcagaaactggctgaaggtgctgtagcaagtgacacaaataaacttgttcattcttggaggaggggagcagtggggtcaaaactctgagaaagaaaggacaatctatttcccaagtggcaagattataaaattcaacctgtcacagtgacaaccaaaaatgacctggtaaacaaataggaatttaagatttgtacataagaaaaatagagccttcctgctcataatgtagatgtgcagcttggccttcatgtggatcctgaactactggaacactggaacgggggctatcacaaaagctgttgcctgtccatgggatttgttctcctagctgagttgcctggtgggcctcagtaggagaggatgcacatatcctcacagaaacttgatgtgtcagggtgggaggatacccaggggccctcaccagctcagagaagaatgggagggagaaggaagaaggatcatgggagggggggacctggagttgggggcagtgagcaggatgtaaagtgaataagcaaaaaaaaaaaaaaaaaattgtctcctggagccaggcgtggtggcgcacgcctttaatcccagcacttgggaggcagaggcaggcagatttctgagttcgaggccagcctggtctacagagtgagttccaggacagccagggctaaacagagaaaccctgtctcgaaaaacaaaaaaataaaacaaaacaaaattgtctcctggaaatccagaagaccagacagaagatagtcaaccaaagaaaagacttgagtgatactgtaatctgactgtataacacagaacaatacaaaggcataacagtaggaaagcaagcttctcattgtaggctcggtcttcagggaagactgtatcctagggcaaaaaccaagtgtttcctcgggatgtgctaaacctggtgctggcccagtatcctctgcaatgatagaattctacctagactgctccatttttcagccagcctctattcagctagactccagaaaaacaagttcagtgtttggtgttttgctatttggtcactaggtggcagtataagcccaggtttgtgctacagacttaaagccataaaaaggagcttggttggtcatatttttacaaatacaaatatttgtagtaccttggatgactttagatggatgcagtcctctgcagtgatctatactatagtttatatgtaactccaattaaaggcatttcaaatcagactggattagcatggatacatttttgggctgttagctccgttctattttgtttacatatgtttcttttttcactcttagggaaactcattccaacagtcccacagcttcttgtcagaggtcctcgataaatattaaaaggttgaattgaaacacagcaagttgtaacacatcacacacatgtatacatatatacatgtatacagcaaccatatgctagctcatagcacatggtagcccgcaaccctctataatggcatctgattctctctttcattgtccatgaagacagagaacacatatagattgagtaaataaacaagtaaataaatgatctttatacacatacctctagggaaaacaatatgaatatagctctcataaattctcaaaaacaaatttaaaaataaaaaaagaacttaaccacatagaattatactagaaataaaagcaaaaagatatagggaaaattcacaaatgcatcgaaatacaatttgcctaaacatccaaagaatgaaagaagggaaattataaaatatgaagatggataaaagcatctcaaagtagcagcagaccagaagttgtagcatggagtaatagttgtaataggaaatttatacttgtaaatactgacataaaagaaacattaaaaagacagttaaaaaaaatgggtgctgtaaatctgaccaagaacccacaacttggacactcaaagacccttggggtgatagtggtggaccatccattattattttgcttatcagacacatcgtctaactcctctctaaatacagacctccaacgggagaggctggctcagtggttgagagcactggctgcttgctcttccagagcacctgaatgcaattcctagcaaccacatggtggctcaaagcacatggtggcccacaaccatctacaatgggatctaatttcctctttcattgtccatgaagacagagaacacatatacattaagtaaataaagaaacgaacaaataaatgatcttttaaatgaatacttctagacccatggattagggtagctctcagacctccccagagacacttctttgtgtagtgaccagggctttgatgtggtcaaaatggagagaatagtatctgtagagtgtgaagggtgctcagttctaaatggagcatctatatcacacagttacatgcaaacctcagagaaaatcacttaagacaggggccatctgggctgggggttaagcagcagtgacaggaccggtgctcaggagctcacagcagctgtgattccaatactaggggaggtactcgatctaccgctgaggagccattgggagttaatggtgtggccctctgatagatccatcaacctgcaatggatgaccccatctccatgcatatatggttggttggcacaaacgggacccagtgtgttattaaaaaacaaaaacaccattaaaaaaaccaccacaccaggccaaagccatcatttttagcatcacaaaaaaaattgaataaaatgaacaatttcttcgactctatcagggaaataacattccccaaattacaaagtctcttagagagagcagcgacttgctgatgagtgagaaaacagctcctgtccacagacagtgtgaacacaggaaaacaaactgacgctttcttggaaggtttgtttgaataaatttaataataagataatccaggctatatccagcgagcaatacacttttgtgacttttcttcataggagccctagagcatgttttttagtgaaaatgatctccatagggattggaacagaaagagaaaaggaagcattctgaaacacccccatagcagtctgctctcctagcttcagcctcagacaaacgtgactcattagaaattcaagtaactgagtcccttaatccccaggctgacatgcaactcctgagctcgaacattgccccaccttagctttcataagactcaaaccgacctgaagggagggaaaaaaaagcccaattctagcccaccacgcttctgcttaaccgacgggaaggaaaactgtacaagacccaagaagaatcgctgtgatgaccacagttgagtggcatagatacagctaatgaacaccctgccaccatcaaggcctcctgtaatatcagagaaatacaataacgtgtcatacaactcagaactaattcaagaagtctctagagcaaccaaagcaacaaattaggaaaaataaagacacttggaacattctccaacctgggatccctctggctgtatcaaacagtggacacatggtatagccctcattttcaaccacatcaaacactgtatgtaaagcttactaaaacaaaaaaatctcagctagaaaatacagatcagaaccaaattcaggcgtggtagacatctgcaaggattagatggtacatctaattatgattaacatggtaaaagtgctaaaacaaaacaaaacggtagactggttttgacccccggacaagggacagaagtgcttattttacatatcaatgcagacctggcttccaggttctactagcagcgttcagtccctgcctgatataccttgttcccaaccttgaactttccagttcaggggcttagctgcccttccacaagacgttctttccaatgttatctagacattttgcgccccacccttctcctctctgcacgagcgcaccccttcttcccttttctcctctcccctctccccatggcaactcctcaatccttgaagccagtgaactccccgagagcagttccccaataagcctacctttaatgcaatcggacttgaatagtctcgtttcacgggcagagaagtcattgatcggagacaacatgcatgaataggagaccaacaccatcaacacaaccgatgctcaaaatcaatagcattaagaagtgagcattcataaagatttggaagctaacacttcagagcacactccagaagaacaaatggggtgtgaggggaagggatttagttagggattttgcttgtcattggcggtgcatctctgcaatcccccaaatctggaaggctgaggaggatcagaagctcaaaggctgcctggaatgcgtggggagaatctccctctaccaataaagagacaaacaatgccagacaagcagaatgtatcaggagacaactggaaatgggataaagatacaagataatacctaaaacctaatggaatgaatgaagctaaagccgcacaaaggtgtgtgtattggggggtggggggagttacagatgcgcattcctaaggaaggaatctctgagtcaccaccacctgcaggaaaaccttggcagaaaacagaaatgacaaaggctcgagcgtaaatacaaaattttaaaatgctgtttttcttgaaaaaaaattttttttaagaagctgatgaaactaagctacaccaataacaaactcaaatcacgtttgcaaaaggagaccttacaatcagtcaatgcttaaaatctctcaagagccgaagcagaagggatgctatctaactcaattcatgatgccagagtgatcctgatatcaaagccagaaagagacacaaaagaaagttaaaaatttatagcccacatccctgatgatcatcatcattacaatatccataacccgagtttgatggaattaaaatatccaggtgggatttactcatggaatgcaagaatgattcaacatacaaaaatcaatgaacacgatatcaccacaatacaatgacgatcatcttgatagcattaaaacaaaaacaaacaaacaaacaaacaaacaaacaaaaaaacccacggggctggggagatggctcagcggttaagagcaccaactgctcttctgaaggtcgtgagttcaaatcccagcaaccacatggtggctcacaaccatccataatgagatctgatgccttcttctggtgcatctgaagacagctacagtgtacttacatataacaaataaataaattaaaaaaaaaacacttggaaaaactcagtgtactcatgattaaaaactctcggtaaaccaggaataggaggaaattgtctgagtacataagggccacattgaaaaagcccacagctaacatggtcaatggtgaaaaattgagtgctttccctttaataagatgaaggaaccaagaatgtttgctctcttagattccaatcctaatagaattgatggtcctgtgcagaacagttggggaagaaaaggaatccagggctgggactgtaccacagtctgtagaatgcttttctctagaatgcataaagccctatgtgcaatcccaatagtggtacaagcctatgaccctgatactcaggacgtagaagctagaggatcacaattcaacgttaccctgggctaaagaccctgttttactttattactttttttttttttaatatctgaattgtaactgactggagtactctgctcacaaatgccatgattatttatgtgggggacttacgaaagtctacacacacatacacacacacacacacacacatacacacacaccatacaactcaggtaattcagctgtaaagttataggatacaaaatgagtatataaaagtgaattgagggccactgagatggctgagcaattacaaacacttgcccccaagtttgaagacctgagtttttgtttgatacagccctggctggcttggaaattactatgtagaccaggctggctaccaatttatttaagatctgtctgcctctgcctttgagtcctgggattaaaggtgcaagccactacagcaaacttggtgttatagtttaaatatatggtttactcctagcaacttgtatgttgtcttggtgctgaaatgtggtggcatctttaagagggtttaattaatttctcaagagcctagctgagttcttggattttaagaagaggttgctataaaatgatcctagcatctacctgatagctcttgtgcatatattatactggacaaaatagatgtttccctaccacaactctcctatgagttaacactgcttccaaccagaaactgagaaaatcctggccagcacagtcttgaatgtctctgtttccagaattgtgacctaaatttatctttactattcatgacttaatctaggttgaggaatgttgctataacaaaaaataatctgagataattgctctgactagaacatttaatattgttaaaatactacttctgttcaaagtgatctgtagagtcaatcaatatctatcgcactcccaatgggtttttgtttgttttctttttgtattttggaagtagcaaaaataactataaaatacatatagatgcgtgaagacccatgaacagccaaaataatcctgaaaaagaacagctcttgtccaatggaccttgggggaaaccaaacgtcacattttacacagagcaggataaggtattggttttcattttgcctctccagaacacaaaacctagatttttttgtttgtttgttcatctgttttaatagggcctcatctttagcctgggcttaccttgaatttggagtctgcctccctcagttgctatagttctgggattataggcataaggtgcaatttccagcaaaaatcctttaagggctgcttgaaactcactatgtagctcagcctggcctcaaactcataaccatcctctcaagtgctaggattacatgaatgagccacagtagcagctaaaaccctttacattttattagggtatattctatacaatatgagtgccattataacatcacatacacgtaagattttgttcctattcactcccattactctctttttttctccctctcacttttactgatccccttactctgctcacacacttctgatttctggtttcttctatagcatggatgaagggttatttacaggaacatggcagattcttaccgaagaaagtatccccccctcccaactccctcagcaaacaataactactaataccccttctgcagggaggaatgaggcatcttggtcccttacgtctagacactgttaactgcctcctcggggagggatgaggccttgtgagcctcttgtagcaactgttaacttcctacacatcctaaggaatgtgggggtccccttgtatacacaggccttgggtagggtaatcataggtgctgtgagtttatgagtatgactgctgctgtatgttccacaataccccatcccttcttccagctttacctttctgccctctttgctgtggtgtttcttgaaccttgcaagggaggagatgcagatcccattagggctgatcttcaacaatcacacaatcacatattcttttttgtttgtttgtttgtttgtttgtttttttgagatagggtttctctgtgtagctctggctgtcctggaactcactctgtagaccaggctggcctcgaactcagaaatctgcctgcctctgcctcccgagtgctgggattaaaggcacgcccagccaatcacatattcttatgactcagagctaaaagtctgcacgaacagaaactagtcttaccaaagctgacagtagcacaaatctacaggtataaacatacatggttagaagacaatttgatagtcataaggtggccagctagggaggcaatagtggtaaagcttctccattagagcctatggtctccccagctagaggcttttgacaaggcatgaactttctcctagcaagtgagcctcaactccaatcagaaagttaattagccaaataaaaaaaatggtaccctgtgctcagcttggcctgtgagtaaatctgtgggacattttctcggttaacgatcgactgggggggggggcagtccacttaaaccatgtgggtggagccacccatggacaggtggtcctgggaggtatgaaaaagcaaagtgagcaagccatggggagcaagccaggaagctgtcctttgtggttcctgccctaatttctactgtgatgtggaagtacaagccagataaatcctttcctacccaatgtatttttggttagaatgttttatcacagtaatagaaagcaaactaaaaactaaaacatctttctaactttcatgccacagtttctttttcttcctttcttttttcttttctttcttttcttttcttttttttttttttttttttggtttttcgagacagggtttctctgtatagccctggctgtcctggaactcactctgtagaccaggctggcctcgaactcagaaatccacctgcctctgcctcccaagtgctgggattaaaggcatgcgccaccactgcccggctgcatttttttttttaaattaaaaaagttgaacctaggtgtgttgtctcgtgcctgtaatgcccatgttcaggagagagagagagggagggcagggtgattactatgacttcaacatcagcatgcgcttacatcatcagttagaggccagtctgggatacagagtgagaacctgtctcaaaacaaaaacaaaaaaacaaaaaacaaaacaaaacatcaactatcataagtgacttaaataatggatattaaacctaaatatcacacaacttcacttaagaaaattctgaggactggaaagatggctcaatgattcaaagtgctttccggaggaagcctgaacaccacagtttgagtcctaacacttttatataataagctaagtgtgggcccatgcatccctataagtccagcactgaggctagcagagactggaggattaacaaggcaaacaggcagacacggtaacagcctcttcatgcatgcactagctcacacacatgagtgcgcgtacatcacaaacacaagcacacacaataaatacatttaaaagttttcttctttctttgtaagtgtgaaaattacaaattgtagaattttgatccagataagaggatcaggagtttgaggctagcctgggctacataagaccctgtttcaaaaaccaaactaaaccaaaacacacacacacacacaaagttgacacaaattttcaccatgtattcgacgtgtcaaggctcacctgggtcatgcaagactaaataaattaattgtaactaaatgcaagactaaatgtctaaagtatttttgaaagtctggcttaatgcaatttgcttcggtgttttgtcagatgacaagttagataggtcattccatgcttgtttacgaacaagacaagtaaaatttctcgagtctctgtctcttggaataggtctttccactgtaggtgggagggaaatgtttccgtctcccaagtgctggaatttaaaggtgtgggtctggttgaactcgttttttgtgtccttcagtggtcaggtgccccggctggtgggtggggtgggaggaggagtatctgtctctattgttcctggactgatcctgaagtgtaacggaagtgaaaggaaggttgagtggagggctagtggacagtgactggcccacaacactacctttaagaagacaaatggaccatagtgatgtacacctataatcctagcacccaagaggcagaggcaggaggatcactgagttcaaaaccgtcctgatctacagagagagagagttcaaggacaaccagggctatacagagaaaccctgtctctgggggggaaaaaaagcaaggaaaaaaggaaggaaggaaagaaagaaagaaatgaagagaaagaaaaaagactaataggtcccagagactcccatgacagtgggaaagaagagtctgcacacttcctcctgctggaattcttgataagaaataacctccagagaaatggcaatcatttacaatttataccacaaattatactacactggaacaccatagtaggccttaggagaaaaacagacgcttaaacatccctacttggaggctttttgaaaacaaagtaaattatctttactgagcaagaaaacacttggtgtctaggtaaccctgtagcatgtgtgaaacaaaagactattgcccagacagagcctcaactttctcctttctattaaattcacagtaaaaagcaaacatgtatagacataagtaataaagtcaggtgtaggcataaatcaccgcatcttttctacaaaagtgagcttaagcgttttacctttttaggacagagtgaaaatccggaagttgtcttctgattgttacatgctgccacggtcctccctgtcactgctgccattgggctatggcctggtgtctgtactcaaactgaaaacttgcaagctagcacacgtgctggcggagtgtggacgcacgggtacacgtgcgcacgcatgaacacacacacatgcacacacgcgtgcgcacagacacacacacacacacacacacacacacacacacacacacacacacacacattttgcgcatgcgtacagatatgtgcgtgcgcacacacatacaggcacacgcacacatgcaagcgaataaaattaaaatatggtaggcgcatggtagaacatgcctttgatcccagcatttggaggcagaagcaggcagaactctgaatttaaatccaatctggtctaaaatatgagttccagttcatccaggaccacgacaaaaagaccctgtctcaaaaacacaaatcacaaaatggcaaaatgaaacaaaacaaaatgaaaaccaaataaaatagaaataagaattctaccttcagctgagtgtgtgtttgtgttatatatgaatattgtgatgaatatctgtaatcccagaactgaggactttgagacagaagaattaggagtttgaagccagcctggaaaagatggccagattatgactgtttttctaaataataagtaaagaaataaagaaaaggagaataacaaccaagcatggtgataaattcgtgacctcatcttctatgtatatgatgtaaaagtcatgaagtaataacctcttacaatattcaagtagtagctttacttggaaagaaagattttaaaagaaattttattttttagacagtcaaaaatataattaagaagtatcgtatctgtgctaagcagacaatataaaattcgggaacaaagaacatatatctttatctgtttgcttatttttatttatttatttatttacttacttacttacttacttacctacttattggagacacatttttttctatgtaacagccctcactattctggaactctccctgtagaccaggctggcctcgaactcacagagatttgcctgcctctgcctcccaagtgctgggattgaaggcctgtgccatcactgcctggcactttttctttctgtctctgtctctgtctctgtctgtatctcttccttcctttctgtctctttcttttttatctttagtatttttaaaggcatgtttttatctgctagctatttatttttgaggtagagtctcacgatacagcctcaactagcctggaactcagaaagagccatcttcctccccccaccacacctggcaggttccttttaaagacattacttctcaactcaaataatgctaaaatcaattgagctgtttatcatctgactattgttggttagctagaaacttctgaagtgttgcaatgtttagctaaagtctagaatttgctgtttttccatgtgttaagtgtcaggaaatgcgaggtaggtaagtgtttgaagatagtgtctgccattatacaaaatgctgagtgataggctgattgagtgtacaaccaaacagatccagatagtcaccaacttatttattagttgctggactggtttttaccaaactatgaggaaaagtaggagggataaaaaagagtaatagaggggtgaatatgcaattatgttatatgcattatggaaatagttaatgaaatctttactttgtacaaatagtatacactaattaaaaagatacaaatagctgatatgcaagataaataagttttacagatctaatgtatacatagcacaggcactacagttaatgatactgtgttagatcctttttaaagaaaactctagttttgctgagcgtggtggcacacgcctttaatcccagcacttgggaggcagaggcaggcagatttctgagttcgaggccagcctggtctacaaagtgagttccaggacagccagggctacacagagaaaccctgtctcgaaaaaacaaaacaaaacaaagagtactgactgctcttctagaggtcctgagtccaattcccagcacctacatggtggcttacaaccatctataattccagttcttagg

SEQ ID NO: 3 - DNA, 82845 bp, Homo sapien
cggcttgctccagccatgtttgctcgtttcccgtggatgtgcggttcttccgtggtttctctccatctaaggagctttgggggaacatttttagttcccctaccaccaagccttatggcttatttaagaaaacatatcaaaattccacgagatttttgacgttttgatatgttctggtaagattttttttttgacatgtcctccatactttttgatatttgtaatattttcagtcaatttttcatttttaaggaatatttctttgttgtgccttttggttgatacttgtgtgtgtatggtggacttacctttctttcattgtttatatattcttgcccatcggggccacggatacctgtgtgtcctccccgccattccatgcccaacggggttttggatacttacctgccttttcattctttttttttcttattatttttttttctaaacttgcccatctgggctgtggatacctgcttttattctttttttcttctccttagcccatcggggccatggatacctgctttttgtaaaaaaaaaaaaaaaaaaaaaaaaacctttctcggtccatcgggacctcggatacctgcgtttagtctttttttcccatgcccaacggggcctcggatacctgctgttattatttttttttctttttcttttgcccatcggggctgtggatacctgctttaaattttttttttcacggcccaacggggcgcttggtggatggaaatatggttttgtgagttattgcactacctggaatatctatgcctcttatttgcgtgtactgttgctgctgatcgtttggtgctgtgtgagtgaacctatggcttagaaaaacgactttgctcttaaactgagtgggtgttcagggcgtggagagcccgcgtccgccattatggcttctgcgtgatacggctattctcgagccagttacgccaagaattaggacaccgaggagcacagcggactggataaaagcaaccaattgcgctgcgctagctaaaggctttctttatatgtgcggggttgcgggattcgccttgatttgtggtagcatttgcggggttgtgctagccggaagtagaaagccaaggagtgctcgtattagtgtgcggtgttgcgcggaagccgcagaggactaggggatagggctcagcgtgggtgtggggattgggcagggtgtgtgtgcatatggacccctggcgcggtcccccgtggctttaagggctgctcagaagtctataaaatggcggctcgggggctccacccgaggctcgacagcccaatctttgttctggtgtgtagcaatggattataggacatttaggtcgtacaggaaaagatggcggctcaagttcttggtgcggtataacgcaaagggctttgtgtgtcacatgtcagcttcatgtctgagttagcctggagaggtggcacatgctcttgaatgtgtctaagatggcggaagtcatgtgacctgccctctagtggtttctttcagtgattttttttttggcgggctttagctacttggcgggctttgcccgagggtacacttggtgcattatggtagggtgtggttggtcctaccttgtgccactcgaagctgaggcaaggctaagtggaagtgttggttgccacttgacgtaactcgtcagaaatgggcacaagtgtgaaagtgttggtgtttgcttgacttccagttagaaatgtgcattattgcttggtggccaggatggaattagactgtgatgagtcactgtcccataaggacgtgagtttcgcttggtacttcacgtgtgtctttagtcatcattttttcgaagtgcctgcccaggtcgggagagcgcatgcttgcaattctaacactgaagtgttggatgatgtcggatccgattcgagagaccgaggctgcgggttcttggtcgatgtaaatcattgaaacctcacctattaaaagaaagaaaagtatctaaggccatttcaaggacatttgactcatccgcttgcgttcatagtctcttacagtgctctatacgtggcggtgcaaactaaaactcagcccgttccattcctttgtattgttcagtggctagtctacttacaccttggcctctgatttagccagcactgatctcaagcggttctctaagcctactgggtataagtggtgactttggccagagtcatagtggatcacaaatcactggtgaagaggtagaatcctaccttcttccaaaatctaccccatgactattgctggggttgcattttgatttcaatgaatattttggatgccaacgacacgtctgatagtgtgctttgctagtgtttgaatttaaaaccgaagtgattgttttcaaaatgtatttacggatttgcttacttgttgaattcattttaattacctttagtgaattgttactttggagtccttaaagttttcaataatttttttggcagatgatactcaaattacttggcacttaaatgtactttctttcaaactcatccaccgagctactcttcaaatttttaagtcttataacacagatactgttaatgtaaagtgaacattatgactggatgtcaggagtatttgaggttctataccagttcaggctttgcttttgttgctattgttgatgctatattgactaatggttttacttgtcagcaagagccttgaattgtaatgctctgtgtcctctatcagacttactgttataatagtaatattaaggcctacatttcaactttctgtgtgttcttgcctttatggcatctagattctcctcaagactcagcaaatagtgctgctgctattgctgccccagccccaggcccagccccagcccctgccccagccccagccccagcccctgccccagccccagcccctgcccctgccccagcccctgccccagccccagccccagcccctacccctgcccctgcccctgccccacccaaccaacccaatccagtccagccctgccccagcccagtcctagccccaggcccagatactttcagacctatcccaagcccacttctacttagagaaattcgaatcttcattgattcagtgctaaaatgcagtgtccatcactcagcctataagactgagacagcccatctataccccctccatactgacttctagagtcatggaatttcacttaatgcatagaatcgtattgctaaaatgcagtgcccatcactcagcctataagactgagatagcccatctataccccctccatactgacttacagagtcatggagtttcacttaatgcatgcagtcctattgctaaaatgcagtgcccataactcagcctataagactgagatagcccatttataccccataccccctccatactgacttctagggtcatggaatttcacttaatacatagaatcgtattgctaaaatgcagtgtccatcactcagtctataagactgagatatccctatgtataccccatactccctccatactgacttccagagtcatagaatttcactttgcatacggtcctattgctaaaatgcagtgtccatcactcagtctataagactgagatatccctatgtataccccatactccctccatactgacttccagagtcatagaatttcactttgcatacggtcctattgctaaaatgcagtgcccatcactcagcctataagactgagatagcccatctataccccctccatactgacttccagagtcatggaatttcacttaatgcatgcagtcctattgctaaaatgcagtgcccatcactcagcctataagactgagatagcccatctataccccataccccctccatactgacttccagagtcatggaatttcacttaatgcatgcagtcctattgctaaaatgcagtgcccatcactcagcctataagactgagatagcccatctatacccactccatactgacttccagagtcatggaatttcacttaatgcatgcagtcctattgctaaaatgcagtgcccatcactcagcctataagactgagatagcccatctatacccactccatactgacttccagagtcatggagtttcacttaatgcatgcagtcctattgctaaaatgcagtgcccataactcagcctataagactgagatagcccatttataccccataccccctccatactgacttctagggtcatggaatttcacttaatgcatagaatcgtattgctaaaatgcagtgtccattactcagcctataagactgagatatccctatgtataccccataccccctccatactgacttccagagacatagaatttcactttgcatacggtcctattgctaaaatgcagtgcccatcactcagcctataagactgagatatccctatctataccctctaccccctccatactgacttccagagtcatggaatttcacataatgtatagatttctattgctaaaatgcagtgcccataactcagcctataagactgagatagcccatctataccccctccatactgagttccagagtcatggaatttcacttaatgcatagaatcgtattgctaaaatgcagtgcccatcactcagcctataagactgagcccatctataccccataccccctccatactgacttccagagtcatggaatttcactttgcatacagtcctactttacttgtccatggacaagtaaacaaagaactcttgtccttcatgttaatcaagatacaccaatcaaacaagagttttatatcagagacttgccatggaggtatcatctctcaagtctcctttcctttaaggaaagaaaaccattctgtcattgctgtagtagtcacagtcccaagtttctaagcagtgttcagtcgtcttttctcatgtattaccttgagtactgaataattctgtcagaaatattttgtccattggattagactttagctagtccagccctgtgtgcatttagcaaaggggcaaacacaggtctgttatcagacagttaaagtgctcagtcccaattttcaaggcattggccattaaagggggtagaatactatatactgttggcatgctgtcatgggtgctatcgccccaggtcacatctttctaactgatggagatacatttatttgctcatgatattgtatactagtctcacatgctttcttatttcagccaaaaacctctgcactggaacattttatgtggataatcctgactaggaattgagtcttttctcaaggtcctaatactacccttgctttatgtaaagagggtgctgattacttaatgcctcttacacaattgtgcaaaattgcagttgttcaagtccccttctgttagtaaccaagatcccataccctcataccctaatgggtgacaatcaagggtgccaaccaatgagaccacttctctgttctggtctttctgctgtgctggggaatcaaaccttgagtcttgtgtacgctagtaaagcactgtcatagagctacagccccaccgtgtggtggtttgagagaacagcctcttatgtagcctgggctgggcgggacttacaggcattgccacctgtaatgtaaacatatttgtgcctgttgtgtgcacagctgcatttgtccctcttcctaagcattggataaagaaaccaaactaagtcaagtcattttgttggtaatcaagaagacctttgatctgtcctgtttttaacttccaggctggcctggaacttagcatataacccaggctagccttgagctcaggatctagcctgcgtttaacaagtgttggcatatctggttcctaccactatgccctgcatgcagtctttcatattgtgaatgtgcatatgtcatttcactgtagtaatctgcatctggtgaagacttatttgtattgcagcagtatttaagatccttaacatagtaaatgtgcacagtgttaactctattgtacatattctcatgtccacagttgtgccttttagatcaggactcctgtacttagcaaagcaaagaggctcactaatataaagcttctttcatgagactatagattgaaacgattccaatacggtcaatggtccttcaaggtaagacttctgtctctgatcattcatatcctctttgctttatggaattatgtatgtgctgtgcacttgaaaccccttcctcaaactatttatgtacatactggcaattttagtaggatcaattttactcttaactttgaagtacagaagtggtgttgacctataaggtcccattttgtggcttgctaataataatgactgattgtagtaggccttttctgttcactacagaaggaaacctgaacagcgtaaaactgtaatggccataaacatgtaccttgcatattagtatgcatttactgcacacatctcattccatttggatacgatcctactctcaaacccttttgcagtacagcaagggtcactaatcttttggcttcttcatcttcctggacactggataaggctgtcccctcctttccactctttaatttccaggactattactttaaagacttaatatttgcataaaggatggggtttttaattgataacatgtcccttgaacattaatgtatataacagggacatgatccattcattttaataaaaatacttggccagttaatgtgtaaaattacacttatccacaaccttattacttttcggaccattgtatctcttgcactcctgcaagggataccgtttatctcccaaggtccctgctagtggaccattaatatacagtgaatcttcctttgtctttgccagtaaacaaaggccatactccttcgcctttcatttgcactatatcaggatatgctgatcaacaaggccgcattcttttggactgttatcatatattaaatgtatgcgtatgcactgccacctgctctgtgcacttgaaaggatcccactcacttccttagcaccttcagcaggaagtgataataagctcaagactttcatttggaaagttcacatgtctaagcacttctctaagaactactgtaccctcttctccgctttaaagcagaaagagggttgtacgaagtgctcttcatttggacttaagtgcattaatgcagttagttgtccatcattacctttggagttggattttacatccttgtactcttttgacaccagaggcatattaattatttctgagcacttctcttgtcaatattaatctgtacccttacacatatgacctgtgcggcagcaaaggttctgaaatgcctaccttttgactggggctgctgagtggtagtaactattagtaacctcagcatttggatgattactatgcaaaaatgtcaaggacctgtgtgctctctttgcataccatcaaggctactgagtcccagaattaattgctaagttatgcgtatttataactatgaatgtctggaatattttgtcccctttacattattgcagaggttgctgagcccccgaaactacccggtactgtcaatgagcacaggggctctgacgaatgacctgctctcttccttaaactgattttgggactcttaataggcacaatggcagttctggatggtttattttctactccaacttgagcaaatcccctgctagtttcccaatgatataataaagtacagcagtatgtacacccaacaatgacccggatttcgaccctttttgcattgctttaatatatacaatcctaaatagtcacaatctcacactttatagtgttccttttgcccggcctctagtttgtccattgaccacttttctgaatcactaattctcacaaacccatcattaaggaagagtttgtgccctttctcaattccatcatgccatcccttttgcctctttgtttgaacagtattgactgggcaaagcccttctcttgacttaaagtcaacaacaccagtttactcacttcatatggctacagtgtctcagttgccttctccttgctcccactgaacagagacacctcgaattcttacattattctgggtaatgttaattaccccaaacaccctatgtgtcattaataaattttggtgtatttatacactgaatagcaaaagcaggccaaaactaggtggatgagccttcaatctttaacttgcacttctaaattattccaattccaactgctggcacattctagggccaggaaccattcttgcctacctttattaatgctttattgtgcaaaatattgcaggcaagtagctcagggagttggattgccaccttttacttggggctttcctttacagtatgaactgaaaattgtcttcctgagaaggaagcttagcacttttctttccattcttcctccaggaaggagccaactgtctgcttaagaaactttaagcccgattttgtatattgctactgtacaggaccaactgccagaaaagttattgataattttattccttaagaaaggcatttggattgcaaggtggattgactgtgagatcattagcttttgtgaagtaaaaatagccatttgtgtcatgtttctgaagactaagcagtgtctcagtgtactgagggtgatgagtctgtggaaagatcagtgcaactattgcagaatgtttaagacaagtatctttgcttggtctttactacaagtttaacaaaacgaaaaagtcaatctttgtgtggcctttagtatgattaactttttggaagatgacctaagccttctaatcattatattttgtctgacattggtcaccagtccttgcttatttttaaaaggtgactggatggattaaatttgagaacatgtcaagtcgcctttgaaaattatataggccatcacatttaattaattcattctatccaccattaaactctggcaataatttgaagtagcttgaaaattcctaaagtgggaatttattttagagatgatagaacctgtttccccactttacattttaaaatatgtctgccaggatctaatcattcctttaaacgtacacttcaaagagagattttcctagtaagaaaagagctttctctagtgtgaagggtgctttgtagccgccgagtacttaggtcttttttgggagctattgtgtatgagtgtatgtatgtgtgtgtgtacatgcatgttgctgcgcgcagtcattcattcacatggtgctcagacaacaatgggagctggttcgtctatcttgtgggtcctggagatcaaagtgagatcatcaggcttggcagcaagtgcctttaccctccgcgtgccatcttgccatcccgctgctgagtgtttgatatgacattgctgatgaaaataatcatcacaacagcagttctcccagcattactgagaaatgatactatttttctgaggaggatgttcaagtaactcatccagtgcaggatcctgcttgaactactgctcctccgttacatcagactctggctgtttagactacagtaagtactaccttgttagctactaagctatctttttctcattcgagtttctttctgtgccacccactgaaaagtcaaagtgactaataagtcactagctcttctcagcttatccatacacaacacatagtatgccaacgaaattgtagaattaacacattgtgtacccaatcgccattatgctggggtacactaaaatgagaagcgatgatattttacaaaatttcttccgtgagatgattatgttatttaagacttaatgtaatataagcacacttgagatcattttaggaaatgtactgcctgtgtgaattgtttaagtattttaggaagtctactggggttgaaatttgacttcttaaagagggaagtgtgcttactttgccttgttggtccagacgactattagtaccatctggttggtttatctgaatgccatctgtttctatctacctcttggaagcatggaaagaatattaagagtgaaagactccatgcattatgcttagctgtacgccaagggtagcaagagatgagcttgtgtaggaattgggaatataaatttgataatttggttctttcaaccatttttactgcatttctgcccagaacagaccactggacggcactaacagcttagacagagaacttcatagcttacaatctttttttttttttttttttttttttttttttttacaaaagtgcaaagaaggataagttttatgaacaaattttactatggactactttatgtaccctccttgctcatttttctttttcattaattaatcaattaattttgttttgttctctgttttgttttgtgacagggattctctgtgtagtctggctatcctggaactcaaactcaagagatccgcccgcagagatccgcccgcctctgcctccagtttagagtgttgggattaagggtgggtgccacactggacccctgccagcacttttcaacagatactttcagttaaaacaacaaatacttgactcctgtgtagaaaatggtctagctgaaaaaacatccttgtccataacacttaacatttttttgcatttgccttttgtacgtgcaaatgaccctctagtactttaacccttttaagtccactgtaaattccttcgcagcaggtttcccccaactccaaaggcttagcattgtctggctctctaggtgataatacatctagaactattgagtcttttaggaaactaggaccattgttgtacaagtaactgcttcaaaaggaaacatttgcaaggaaaaaaagctttttgagatgctaaagaatgtgtttggtgcactaagacagttagctaaagcttcggtctcaccttagcaccattggctacccaccccagtacatgcaaagtgaccccccccccaggcttgcctaggcacctagagctttcagcctgcctcctatggacctaaatagagattaggactcagactccagttagtggcctggaggaagctggtactgctgctattcacagtaaacccactatcactgacagttccctattgaaatgatcaagttgtgtgagcaggcagatcattaatcagggccaattctgtcatggcaacctagtcctacatgacctccacggcactgtaaaatacacacttatttgtagtaggacatctggaacatgagcttgtctgtgattgaaatgtccattaggaggtgccatcacacaaaaccatctggaggccatctttggtccccataattgatggaatacaaagagttccccaaattagtgtcctgacccagccctcactgtcagtaatcatgtaatggaaagccaccaactcgccatcaccatcttcaggctgcctgaactgtatacattaagaatgagctttcagccgggcagtggtagctcgagcctttaatcccagcacttgggaggcagaggcaggcggatctctgagttcgaggccagcctggtctacagagtgagttccaggacagccagggctacacagagaaaccctgtcttgaaaaaaaaagaagaatgagctttcttccaagctgtccaatggcttgacccagacttaggagtttgtaaacaaagaaccctgtagaacaagtgaatttgagaatgtacaccttcattaagtggtgggaagtggaagtagtggattttgccagctgattttacaaagccctgtggcagaaccagaccaggtctttgtatgcatactgccatataacctagccactgtccaacctgtgccctctctcccagtccagtgaacctcttctgcctgccccttacttagtcctctggctcatcccaggggaagatggctctatttgtgtagtcataagaaagttttgttaattttaaataaaacaggaaaagagaaagctcacttaagacgagagctggagagatggttctgttagtcttccagaggtcctgagtacaattcccagcaaccacatggtggctcacaaccatctgtaatgacgtctgactccctcttctggcacacaggcatacatgcagatagagtactcaaatatacaaaaagggaaaagaaatgaaaggcctttgaaatgtagacatgctttcaattttaaaggctgttttcacatctcttaagaactaggggttccatgagaacatatcctcaccctgagttcttaccaccaattgaaaacgctgacatgtgcatatgaagattgtattgctagtaatcaaattatcatttgtagagtttagtataattatcatttgttttccagggatgaatttggagtctgttttgtgctcctgcctcaagaagaaggattgcctggatttagaggagtgaagagtgctggagagagcccaaaggtatttccgttacttggttgactgagatagtatcttcccttaaaggtctaatgtgtcaagttatacctcctaagtaaatacctcattattttcatgtggaattttcaacaatttttgtagtctaatgatagccttgtatttcttcacagggacaaacaatccctatgtgagactcaaggactgccagcagcctatacagctacattacatctcagcagaacttctcttcaagtcctcgctactctgaacaaaaagcttacaggccacatggagaaaaaaaggtactttggagaatttgctatttgggggtttctatctgatctccagttcatcagagaatgagggggcaagtcaataaagcactccccatctcctggtcccctggcatagtcagttagccaatgagatccttgccttatgatgaggccttgaaatcatccccaccatgttatgaccaatctgtaacatttctgctctgaaatgcctaaaaggtaggttatcagaggaatgaaggccagtttctgacaccctagtcttttgtacttgatagagtaagtagatatggctgttgtcacattctgtaggcctgtcataattctggtctctgaatatcctcaaactcagaggtccaatgctacaccagtttctagggacatatgcaccataagcactgagccaaacaatgctattcaccttgccagtgttctggcatggtattgtttaaagcacaaattaaaagaagaaaataatttaacccctttattcccagagtatttgaagtacaaggactttaacacaacctataatctaaaggatctctcattggtaggtgacagaataaaagccagaaagaacttggatggagcaattctcatgtctctaagttaacactaagatctacaaatgtgaagggttcactctccaagcccctccccatgatttaacacaactgctggttactacataatgagacaactttcccagtattcttgatttcaagaattggcttttctttcacctcttttccagatctccccccagaattgtgggcttgctgctttgcagtgctggcgacctattccctttgacgatccctaggtggagatggggcatgaggatcctccaggggaatagctcaccaccactgggcaacaggcctagcccagatttcagtgagacgctttcctgaacccagcaaggaagacaaaggctcaaagaatgccaccctacatcaaagtaggtaagttttctgcaacagtgtaataattttaactttgatcttgttttccattaaagtcagccttttacttgagatatatacataaattttatctttttcccacatctgggaaatgtaactaaacagtgcaaatgtttcttctaggagaaaagctgctgcaatagtggcactgaccttcgaggaagccattctgctctatttggttctctctccagaagctaggaaagctttgccagctgtttacatacttcaagatgcactgctaccctactcatgccatataatacacaagtgagtagcttatttacctacctagctatttacgagtacactgttgctgtcctcagacacaccagaagagagcaccagatctcattacagatggttgtgcgccaccatgtggttgctggggattgaactcaggacctctggaagagcaataggtgctcttaaccactgagccatcactaacattactgatgatgaatgcctctaactacaaatggaaacctggctggaattgatacagaagtatctatcattaggcagaatttaaagagccaggatgttctagtacttctttcctggcattcatacagcttcttttgttctttgtagtgccatctaccaaatattacccttccccaaagcagcacagaaaactgggtcttcagcgtgatcaagcaatgtgaacacacaaaaggaaggcagctttataaatgacccgaggatcaacatgcctgactgcagcatcttaaaagcaatagaatgaggtaagtcactagcattgcagtcttctgaggatttgcatttgctggaagatggtgctgggtggagagcatctaatgtgataatgtgaggcagggccatgtacacgatggaagatgaacaggctttcacgttatcaaatggcctcacagcagcaactcaaactattatctgcttaccagttatatcacaagaggaatttagcttctaggttttgttgttgttgttgtttgttttggcttggtgccctaccattcttacagacttaaacattgaaaagctttaaatagtttatttcttatctccatctgtgaagcagccattagacttgtgaaggatgtaaaaaccaagcccccccttttttttaatagaagaggagagtgaagctgacaattaaatatgcagtcgcttatagtgtttgctgcttacagaagcttttaatccatgtaacagaatgttgagatgttcattctgtgtttaaatgtaatattccctagatgtatgccctttggcaatttagttctgctaagacctgtctgtttgtgaaggtcaaatgaaatcatgaatggaaagtgttgagtacagagcctggcaaatatgccctggagttgcatgactaggccatttggaagagttgacgggtgtgtcctatggtcctatgttaaggaaaccttaagtttaacgttgatagcctggtacagtgtactaatggcaatttttttctttgcccttccctgtttcttgttaccctctttctggtggtctttgcttactatcaatcattagtgtgtattgtgggtgtgtctatttcttgttttatgtatctattttttccttggtctgtgtgtctaattctttgttacatctatttcttccttgctttgtgtgtctatttcttccttgctttgtgtgtctatttcttccttgcattatgtctaattctttgttatatctatttcttccttgctttgtgtctatttcttccttgcagttgtgtctaattctttgttacatctatttcttccttgctttgtgtgtctatttcttccttgcattgtgtctaattctttgttatatctatttcttccttgctttgtgtgtctgtcttccttgctttgtgtctatttcttccttgcagttgtgtctaattctttgttacatctatttcttccttgcttttgtgtgtctttctttcttgcttttgtgtgtctatttcttccttgcagttgtgtctaattctttgttacatctatttcttccttgcttttgtgtgtctatttcttccttgcattgtgtctaattctttggtatatatatttcttcattgctttgtgtgtctatgtctccttgtgttgtctaattcgttgttgcatctatttcttccttgctttgtgtgtctatttcttccttgctttgtgtgtctatgtcttccttgctttgtgtgtctatgtcttccttgttttgtgtatctacttcttccttgtgtgtctaattctttgttacatctatttcttccttcctttgcatgtctccttctttcctttgtgtgtcttttctgtctgcagtgtgtcttacctattcccatgtttctcctgcatgttctttcttgcagagctttgagctttgtttcactttctctggtgcctgtgtggtctgctttgtcttcactagctatggctctctgttttatctatctggttgctatttctcttagcttttctttcactcctgcctttcgtgactcccctttgggtcacatgttgcatgcatccctctctttttcttgtgctcaccccacttgttctttgttcaagttctctttgtcagtccatttcagttttctttctgctgcttctatccttagtgaattcttgtttacatttcttccctgcctttcttgggccactttctctgttttcttttgtatttgtgtctctttgctattggtggatttcttatctcagcatcattctgttgctttgtgtttgcttgtgtttctatcttctactttcctcctttctgttcactttgagcatttcatctctttacaagtctgtgtctctcttgtattctaaagtaatcctttcttggatgtttctttgtatgtacatgtgcgtgtgtgcatgtgtgttatgtgtgtcatgtgtgagaggagcttcatagccccttcccaataggtccagaatgtcacccgtggagccgttcctcacaccagactgccctgagaaataatctaagacaaaatacatcattccgtccggtcaggattcaagtggctctgaagtgaacgcccaagtagaagacagaagttttgcgacttgagatttaaaaggaccaaaatacacagatggcccgtcttgagctggctggacagaatgctgacaacccaaagaagaggaactgtttctacaggacacctgtgacttccaagagcggggaactacgtatgtcataagacacaaaacctgagctaagtccaagcataagacctaaggacccaatcctatatggacagaatatttaagagataaaggcctatggcccagaactctggaaggatatttctatccttctatccccaagaccaagaagggaaattcgaagatgagacctgccccccaaccccagcatccctttccatttcttatatttctatttaagctgtcttcacttgagatgtaatttttcattgttgccattgcccataaaggaatacgtttttagctggatagtattgtgcaagggtctgttttaaactgggtcttagccatttgttaaattgttgatgttttacaacttccatttctcttcacatctgctccacttgagacggaactaaatccagccagtgtatatagcctgactattgaaacttccctaggaataagcatgcatacagatatgcatactgccatcctccctacctcagaagccctaggctgacaagaaaaggaaagcatcaggttgttagggggaaaacaatgtcaggctatctagagaaaatataaagagttgttccagaccaatgagaagaattagacaagcaatatgcagatgtgccaaccctctgagaagcaccagccagtgtcaccttctttctttgggcttaggtgagcagggtatggttttctaataatggtttggggacaaaatgaggtctgaactccctgctcatagtagtggccgagtaatttggtgcatttcaccaaaggaactcctgggtctaatacctacctttaaaattaatgatgagagactctaaggactacttaacgggcttaatctttttcgtgccttcctcttcctctgtaagagggaagttaaatgacacaggatgaaaaagtaacatgctcatagcacattggcaattatacatggttattatctgaaagtgtagagcttttcctataaggcatcagactaagtacctgaagctttgtgggttcatggtcttagttgcatattccttagttgcaaatccttttcaaaaggtaagaaaaaggcacactggtctattgcctgtacttgatcaagccctgatatgaatgccagggaatgtctgagtaacattaatttccttccctgcatattttttgtgctgaatactaaggctgtgatgcttcactgtggtcacccccaggtaacaagatattaccaggtaaccaggaaacgtatgaatacgtaaaccatgaagcctactgtaacttccaagtcagtgctgagtatgtattacatagtagctgaagtctacgcctctgtgtgctataggcacaaagattgctctaggaataacatgctttgtaaaaacaaatatatgaacataacggggcttgaatgaataacagtccatatacttaaggccagtgtgtttcttctgctttggtgaggctcagtaagttatattataccaggtagcagaagagaaaacacatggaaactgattttaaactacaaactaggtcactaatgcaggtgattgattaccctattctgatcaccttctaatttctgaatacccatgttcagcactgggaataacaaagggggacattaccacagaactagaatttacaaaagaatgcattaaataaagcattatacagctatcaattgttccatgtgtgcaaatgaatgactactaactacctctgatgtatccgatattgttttgggtacatgaaatattcatgagtaactgccatgaaataagaatgtttgcattccatactattcataaggaatgagccaatgcttaatttaatcagtcaaaacttgagtgataagggcatgttaatacaagaacatttgcccaggtcacattatggttgtgggtactttcttaactataaagcagttcagtagtataagacaagacaaattttctatagaaataaagctgcctataaaataggcatagtctctacaaaattttcattgtactttttagcccataatgggaagagtacagttaacaagctgggtgtggtagcatgtgctctgagctgaagcaacaggaccacttgagcccagaaattggaggctagcctgggaagaccataaggtcaatctcaaacctggaggctaaatattgtctcccatgtgtatattctctttcatgggtactggagagatacacagacgtacatttcagtgtgtccacacttgagaataatatgtacgttggcattttatgaactcggaggtaccatataaatgtaacaattcattttcttacttggtatcaatttccaggcttttaaaattctgccacatttattatactgtgaaaataaagtaaataagtaactgtgaaccactgaatatatgaagcattcaatacttgatgagtacatactgaatggcagtcatttattacaaaacagtgcccttgctaggcactgggatgcaaagagcattctcattgtcctgtgtatctaaagaaattatgcatgagattaatttataatttgtaaactgccatatatatgtgtatatatgcaatatttgcctggtgtgcaatgactttgcttttatcccaggcatgcacaacagatctgtgtggagctttgtgaagtctacagttctataaagccgggacctaactgttggctttatcagtgaacagtgattactttctaagtttcataatggctgaaacttaatcataatgcttatcacctaacaccacctaataataattttaccatgctatgtgttgagcgaacacatagattgctttctagcattatgtagcacttataggagtgaaatctagaccaaaacttcaattcacttcaatgaggaaatgaaaacagaaaaaaaaaatggatttgtgcaaggcagtgtgctaaatgttacactgagtggactatgctgtctaggatacttcccagctggcttgactgaggaggtggaaaaggttttattaatgacaggaactttttccatccagtttcttaaatgtttgttgaatgctgctgccagagatgaattacaaacaccttgccagtaaaggagttttatagggccagagtgagataatcccagagcatgggtatcagggaacaaaacgggaagaggccagagcatctgatggcatgtactcagtgtggcccagaacctctcgaactagatgtactggctggagggaccaagcatgcagaacacaacacctaatgaaacattgtatataaaatatgctaacctaggtcctaaaactaaaatgtgaggtggacctagtgtagatcactgatcataggagacatggtctcataaagcccaggctggttctaattggtgactgtcacagcttctcaagtgctgagattacagatgtgcttaacccatgcccagcctgaagaatatatctgattactgagtgaataatatttttaaagaattatatattttatgtatatgagtacgctgttgctgtcttcagacacaccagaagagggcaccacatcacattacagatggttgtgagcccccatgtggttgttgggatttgaactcaggaccttcggaagagcagtcagactcttaaccactgagtcatctctccagccttctgagtaaatattttaactataatggctgtttgcgaaacccaaccaaggccaagattccttcaacataaactggagacttcctagctaaggaagctccaaaagtcattttctcattggcctagcttgaagccaggacagacttaaagtctgtcctttaattcattacccattttccttttcttactgttgaagtgtttcaaaggagaatcaagatgaatcgataattctaaacgtatttgttcattgcctggctcagcgtcatgtgagcaagaagaatatactatcacactcatacttttaacttaagtgtgatgaaagtgcagttctaagtactaaaatttctaagtactgaaaagaacaaagacatttaaaggatgcaacccaaagtgtactttacctcagtagtttctgaggggactgcagtcacaccttgagactacagctctcactttagctgggaaaaacatcaaggtgtagaggaggcaagttaaataaaaagttgctcccctcctcatgggcatgcttggtagagtggaaataataaaagaggttctctatttcctcggttccacacattgcagaagatgctactggatgctaagtgcaacacatttgttccaaaagggcactcagtgtgacttacagatgccccggaaagcagagggatgctctttattaaacagaaatattagctcaaacgttttctagactgaagaacactttcctcatttcccacagtttgcctcagaggttgaatacaggaaggttattattcattcatttgctttattggttcgcctgttctacaaggatttgcatgtctcttaggccttcacttggctcctgagacatggaaaaaggaaacatagacatagggaagtgctggatggggggggggggtctcttttctgggtagtggcacgacttagtccttagtccccaagtaatatgcaatgtgagtcctcatcctcatgtcttctccggccactgcaatgagtgggaagctgggctttgtagcaagcctgaccctaaagttacagaagccctccacgctaagaaactcaattttctaggccattttagctatgactgtgaccactactggtcaggagggatgacagccatctaagttccacaatcttaggctactttgcattatcctggggcaaacaagccatttttgagctgcagcaggctttgaaatacattgaccaattttgcctgtgttcgttaaaccttttacctttttacatgctaatgctcacagtaatttagaaatgttctccttactataatatactcaaggtggcttgctatggtaaaataatgccagtggatgaaaataacattaatgtttaacattcttgcataaaatttaagaataataaaattgacaacaatcagaaaactggaggaacgaaagaccaaattgaaagaacttgaaaaagattaaaaatgcctgtgctttgaccctttccatttttctttcactcacagagggtgggacaggaggccgagtgaaggaaagggtccagcctgtctatctggaatctaagttgggactttaatgcagttccacaaaattggtattaattcgctaaatgtttctgaaaatgtattttcatctaaatggctatcagctaagccttgagtcaaatgggaatgaaacagattaagtcaatgtgatctctttatccaagttgccttagagctgaagtcacaatttgctgtaaggaagcttattcattgtagcatacgcatactttcaaagtatctagactttacttagtaacccaatcaggacattcaggcaaaagaaaaggaacagagaagatggagccaggttgaagaggtctgggagttcaaacaaatttttttcattttcattaaaactcaattgggcatcaaaagtgttactaatattagcttttaattagtggaaattggctggattcagtaatatccctttgtatgggtaggaatgggcttacatttctggaatttgcaaaggaaaaaataactgaaagccttcctttcacagttactgccatcaatattgctaccaattaagcacatcctaccatcatctgctttgatcacataaatgaactgtgtaccaatctgttgttgaaagactggagtcatcttcccaccaactgtgaaaaaacacatggaaaacacctggactttgtgaacggatgcggaatacagaacttctgttgactcttgggtgttttgaagacttgaaaaaaaaaactgttgcttaccaacatgtcacaatgagtccgtgtgtgggtgggtggatgggtgggtgggtgggtgggtgggtggttgagtgggtggggtagtttgctgttaaataaaatgctttgttttgaaaacatcatgtgctgtatatgatattttccttaaattttatttaatgtgcatgagttttgtctatgcattaggtttgggtgttatacccgtgtaggccagcagagggtgtcggatcccaaggaaaccaagttacagacgccatcttgtgtgtagccggaatgtaattcagatcccctggaagagcagttagtgctcttaaatcagttcaccttatgctaatacaaggagccaacaaaaccacaaaagcctcatctacaatgtgattggcaagaagagaaagatagacaggtactgcaagcgagtgtgagtgaggcaggtacaagaatctattatggtatcttaaccactgccacattccccttttcctttgcatggagccagaactaggctagcctccaagtccctaagtagccggaatgactctgagctcctgatcctcctgtgttagaattacaggcttgtaccactaagcctgcttttcagatgatagtttctaactcagtggcccttttatcataccagatacctcagttttaattccctatgtaatgaaattggttatgttgccctggccatctggctagcctgaagtccatgtagattaggctggccctaaatccatagagcactgtctgctactgactcaggagtgctcggattaaaggcctacaccaccaggcaggcctagccagttccttgggtaatttgaggtctcataacttagagcctaagttgttcaggagaaagattatgagaacacaaatctaataagatcacgagaagcaaaatattgaggctcaaaagtgggagtactggtaagatgaaatgaaaagaaagaacatggctgtcaagaagtccttgaatagagaaaggggcctctgatagttctaaaattcaaagtgacaaaattgcgtctaggagaaaagataaattctctcaggagagagtttgtactgttagacatggctctgcctagccattgctaaccagtagaagtgctccaacaaaaccgggccttcgtttccatccaatgaatgggccagaaaagcaacaacattttacctgaaatcagttcaccttatgctaatacaaggagccaacaaaaccacaaaagcctcatctacaatgtgattggcaagaagagaaagatagacaggtactgcaagcgagtgtgagtgaggcaggtacaagaatctattatggtaaatcttaacatctttggaaaatagcattggcccaactccaagaagcccatgaaaccttaccatttattactggcaactaaaggattgggacacagggcactcaaacgtatccactgatgagtatttaatagttccaaactatgtctggggtgaactatgaaacactaaacaaaataaaactagcaaatatgacagagacattttgtaaggaataaggggtgctggccagggcgggagggaaattgaaagtggaagagtaagcagaatgcattctatatacctatgaaaaatttctaataaaaaaccctatttaaagccgggcgtggtggcgcacgcctttaatcccagcactccagaggcagaggcaggcggatttctgagttcgaggccagcctggtctacagagtgagttccaggacagccagggctacacagagaaaccctgtctcgaaaaaacaaaaacaaaacaaaagacctgtctgagctggagagatgatggctcaggttaagagcactggatgctcttccagaggtcctgagttcaaatcccagcaaccatatggtggctcacaaccacctgtaatgggatctgatgccctcttctggtgcgtctgaagtcagcaacagtgtacttatgtaaaacaaaatgttttaaaaaatagaaaggaagaaagagagagagagagagagagagatgctctcataaacaacgtggaaggccagatgcacacctgaagttgtcctctgactccattatgctctgtgcaaccctcacccacaaacgtgtacacacaccatccacattcatatacaatacgcatcacacaaaagaaggaaggaaggaacgaacgaaaaagagtcaagaggagggctgccagcatccttgccctgatggctagggtcgctgcacgggtcagcagcactggactccctcgtctgactgtcaccctggtcatttagaagccaaacactgcgattcttcaaaggcgggatctgggctaagtaaggatgtggctcagtggtagagggacagccagggcctcgaactcagaaatccgtctgcctctgcctccggagtgctggggattaaaggcgtgcgccaccacgcccggctttaaataggattttttattataaatttttcataggtattgaagaggcacacatgagccccttcatggtttgctagaataaatgctcttggtgatataacttggtttcctcagcctgggttcctcaactagaaacaggcagttaaggtccaaggcatgagttgtgagctgcccgggtcttccaggcaacctgcaagtgacaggttcttgctatgcatgggcatccttattccccctgggtgaggagctttggaaactcaggggcagggagactccttctgaggcttctggaaagagagaatagatgtgaggatcaggtagaagttcccagactgtccctgccatccaagagggaggcaggagctgggctgggtatgggtcacaaagccagcagctgctagcactgagggtccttgcctttctgtcccatggcccctctcccatctgcactgtggttgcagagcctgagccagcacttcccccgactggagaatgacagaggcagagtccactcctcccattccggggcgggaagccaccatgttgcacctgggcccagcagggcctgggaacacgaggagcccacggcacccaaagccctcccctcaacccaggtccttgcgcaaggtcaggagagggcaggcaagtggccattaaaactgccctcccggcacaatggcacagtgaggtgaagctggcacaagaataaagaagaggaagaaatagagctgtagatagaagagacagcaacgtgtaataacatggcgccttcaagggtcaggaagggctattctgcaagtaatctcaggttaattagttcctctgtgctttactcgaaccaaaatttgtctcctatcagggagagaaggtggagtggataagattaaactaagcacacacagagacaattgtttttgcttttgtttttctttcatttttgagtcagggtctcacattgcagtcctggctggcttggaagtctctggcatactgctggaaacccaagcactcaccctaaccaagcactcaccctaaccaagcatgcaccctaaccaagcactcaccctaaccaagcactcaccctaaccaagcactcaccctaaccaagcacacaccctaaccaagcacacaccctaaccaagcactcaccctaaccaagcacacactgtaaccaagcactcaccctaaccaagcactcaccctaaccaagcacacaccctaaccaagcactcaccctaaccaagcacaaactgtaaccaagcactcaccctaaccaagcactcaccctaaccaagcacacaccctaaccaagcacacaccgtaaccaagcactcaccctaaccaaacattcaccctaaccaagcactcaccctaaccaagcacaaaccctaaccaagcacacaccctaaccaagtacacaccctaaccaagtactcaccctaaccaagcacacaccctaaccaagcactcaccctaaccaagcactcaccctaaccaagcactcaccctaaccaagcacacaccctaaccaagcactcaccctaaccaagcacacaccctaaccaagtactcaccctaaccaagcacacaccctaaccaagcgctcaccctagccaagtactcaccctaaccaagtactcaccctaaccaagcactcaccctaaccaagcacacaccctaaccaagtactcaccctaaccaagcactcaccctaaccaagcatgcaccctaaccaagcactcaccctaaccaagcactcaccctaaccaagcactcaccctaaccaagcactcaccctaactaagcatgcaccctaaccaagcactcaccctaaccaagcatgcaccctaaccaagcacacactgtaaccaagcacacaccctaaccaagcactcaccctaaccaagcactcaccctaaccaagcactcaccctaaccgagcatgcaccctaaccaagcactcactctaaccaaacactcaccctaaccaagcatgcaccctaaccaagcactcactctaaccaaacactcaccctaaccaagcactcaccctaagctcagttccaatagaaagaataactaaaagaattctgtagacaagggagggctttctaggtttaaaattaatttactggtccctaaaaaacaaacaaacaaaggggctggagaaatggctcattggttaagaatgctggctgctcttccggaccggaccgtggttgtggttcaattcccagcacccacatggcagctcacaactgtctgtaagtccagttccagggtatctgacaccctcatacagacttacattcaggcaaaacaccaatgcactaaataaatacatacatacacaccgaacaacaaaagactacaggtctgaaaaaagccagtaggcattgcaagcctggaggtggtggaccatggatcagaattcaaggctgggctgggctacatgagagcctttaaaagtaagtaaataaacaaggccttattctctattcccactagggaaatgaagcaaactataattggatatccctcgcatctacctacttggaatagctatctagaacctaggaaccagctggtgttggaggcaagggcctgtaaccgcggcacttgggagatttagagcaagaagatgaagaattgggtctatcctgggcaatgtcatgagactctgtctcaaaaaaaaaaagaaagaaagaggagagagagagagagagagagagagagagagagagagaggaagaagaagaggaggaggaggaggaggaggggggaggggaggaggggaggggagaggagaggaggggagaggagaagaaaaagaaaggaaggaaggaaagaaagaaggacaggagagctggaaagatggctcagtggttaccaagaacatttgctactcttctggagcccctgaatttgttttttgtttttttaaaggtttatttattttatttatattagtacactgttgctgtcttcagatataccagaagagggcaccagatcccattacagacggttgtaagccaccatgtggttgctgggaattgaactcaggacctttagaagtacagtcagtgctcttaactactgagccgtctctccagctcctgaatttgttttttgtttgtttgcttgtttgtacgttttgagacagggtcttgtagcccaggctggtctcaaattctctttgtagataggatgaccttgaatttctgacacttctgccttgacctcagtgctgtgactacaagcacacccctcacctggtttatgcaggttccggatggaacacagggcttcaggaatggcagagaagcaagttacctgactcttgctcagccattttgaggctataggaggagggggacaccaggcagtgagtccccatgtcaaaaaataagtcgagccaggcagagagggacgtgcttttaatcccagcacttggcaagcagaggcaggtcgatcactgtgagtttgagaccagcctgggctatactatatagtgagccagccagggctaccctggaaaactctatctcaagaacaaatcaatactgtactctcctcgaccttggccagagaagtttcttctgcaaggaggagcagctaatgcagactcagagctggcctgagactgagcaacaattgcatgcttagctccaaacaaggtgtctatagcaacccacacactgcccaaggcccatggaacatcgtggaagcagggctggaaagaacatgagagctaaagatggggaggcaagctgtgaaaatgctggctgccgccctcacaagcgtactgcggctgtggctacctgcatacgattccgacaagattagccaacattccagcaagcactgctaactggactcacagggttgttattattattatattattattattattttaaaaggagacctcattaaggttataggaagacagcttcgggatgtgtagggagtgggggagaagtacgagtgaatgcatgtatgaaattgccaaggaataaataaatattaaatatagggaaaacccaacacttggaaggtggaggcaggaagggcaaggtcagcgttggctacggagcaaactcaaagccagctgtactgcatgagactgcgtctcaaaagaacaaaggtggaagaagagctcagcagttagcagcacatgttgctcttgctgagaggacctgagtttgctagcaagcacctaagtcaggtagctcacaagcctctgtcactccatctccagggggccaatgcctcagacacacatatttaaaaacaattgtgagcagggtgtggtgccgcatgcgcatgcctttaatcccagcactcaggaggcagaggcaggcggatttctgagttcaagtccagcctgatctacagagtgagttccaggacagccaggactacacagagaaaccctgtcttgaaaaaccaaaaaaacaaaacaaaacaaaaaaacaattgtgtgtgtgtgtgtgtgtgtgtgtgtgtgtgtgtgtatgtgtgtgtgtgtgaaacaaaacgaaacaaaacaaaacaaaacaaccctactttcatatttttaccactggtagtaaaatccaacactaaaaggaattcctggcataagaaatcttgaggatgaaaagtcaatttaagggtatgtttgaacatagcactctgataaagacaccatccacccatttgtctaaagtgagttagtcttcccaatcaaatcctcacttatgccaatgcctgccttaaatgttttctatgtgtagtctcctcaattaccatcaacattcaaaccatcactttcccctataattccatttaccttggactttcacttccagccttattctaatttcttgggctttcatgtttattcgtcaactttcattttcattatacaaggacctgataagtttttattgataaaagttttattatttgctatgaattgaatgcggctatgccctcatgtgtgtgtgtgtttaaatagtaagctcagatgtttacttaaaaacaaaacaaaacaaaacaaaacaaaaacatgtgttttctagccaagttggtcaggaactgactgtgtagcccaagctagtcttgaactagctgcaatccctttctgcctctgcctttaaagtgctaacaagtgtgagccacctgcccagctataactactattttttaatgtgagcactttctgttctcacagaggacctggtttgatttccaacacccacattgtggctcataaccatctataactccagttccagggatcctagcaaaccctcttctgacattggtgcccaacaggcatacacatgattcacaaacatgcaaacaagcagaacactcatacacgtaaaatctaaaataataataaagtagacctatagagtatatataattccaaatggatttcagtagaagaccctacttacattgcacagaaaaagctgtctggctgcttcaggcatgccaatatcagcacatgtaaacaagcttccaactttgtttttgagtaatcaactcattattcaccagatctgaggctatttctattcaacagcacaagaaaagaagggagaagcaggaggatctctgtgagtttgaggccagcctggtctacagagctagttccaagacaccagggctgttacatagagaaatgctgtctcaaaaatgaacacacacacacacacacacacacacacacacacacacacaagcgcaagaaagaaaccattcgaatttgactgcatatgtacataaaacctttaaataaaagacgtaatttcaaatcaaatgaggtcttaagaatggagcctaaacctgtctgtctctttaccagacgcagggcagccagaaggcagccattcacaatccaggaagacaggaagggataacaccagaacccaacctccattttagagaggtctagcctcttgagctatgacacactatttgttctctaactacccaaagttgtattttactatgctaattagctgattaagacattaggtaaaggtgttctacaaagaaactgtaaataaaagacatactctgtgccttagcctatctcatgattccttttctggatgtcttcataaccaccttaacctctacgaagatacagagacacaggtagcactacagtgctgtatttgtttaagcccccaacaaacttggtggcttaaagcaacacagatctataaccttataattttagaagtcagaagttcagtgtgagacacctagttgaaattgaaattattatttgaaattaaattgaaattattccttctgtaagttttagagaattcatttccctgccctttttagcttcaaatttcttagctagtaattgccttcctctatgtctatagccggatgtagagtctttgtcaatcttttatccctgccatttcaatgaaacaacaccttaccttctaggggaatctttttatctcaaggtcgattgattagaaacctcagtttcttcctccaatgtaatatagtatattagtatattctggggagtcagtgtttgtctgcctactaacacaggtaagaatttgcataggtattacaaaatcagtactttgcaaatctttcttctcttccgaattgaaaactgaacattaatccaaacatggcggcagaagcctttaaaatcggcactgtcccactgaaggcagtggcaggcagagctttgcgagtttgaggttatttactgagaccttgtctcagaaataaggcattaaaaaaaaaacaaaaaacaaaattcaccccaaatccgcatcaaaaccaaagctgattgttaatttccctcctttctaaactggattcattccttagtgccattgtttgctcgtctgaacacactgaataaacactaccgggagggattttccgtgcctatagtaaataagaatatgatttttcagatacgaaccactgagaattgttttgccttgcccgccacccccaccccgaaaatactccttgtcccagatagtagaaacttaatgggttttcaaagcactcagattattttcgaatttcaacgataccagagatcgggtcattatgtacctcggaaataaacggaacgcagtaccaaaattttaggtctcaacttccaaggcttctcaaagaaagttatcgcagacttagttactcgttcttggttacttcacacgctaccagtaatttttccacttttctgaatctgtgccccccccccacattctttcatcaactttaatccaaacgcgtacaatcagaaaaccccactaaagcggaggtagaatcccattggtttttagcataatcacatggcgggaaaattgttaccaaaaaaaaaaaaaaagagcaaaaatcttacctgaaaaagacacgtgcggtgaggtagtattgctgaatttggcttgagcaatattaaaatattaagactattccaaagagtttttcggacacgaggctttccctgatgtgagtgtgtggattctagaccctgctacaagtcacgcccttaactttcttttccgctctagactgcagtttattacccacgccaggcttattgaacgctttgcatatctacctgtaacattttagccaaccatctctacgctatcccagacattttcatcacctctgctctgcccagcagacattttagtcgacctctaggggttggttataaggcagggattttagcgatctccccaggtccctggcggcggcaggcattttagtgatagcccaggtccccggtggcaggcattttagcgatagcccaggtccccggtggcaggcattttagcgatcttccagatccccagtggcagacattttagtgatagcccaggtccccggtggcaggcattttagtgatagcccaggtccccggtggcaggcattttagcgatcttccagatccccagtggcagacattttagtgatagcccaggtccccggtggcaggcattttagtgatagcccaggtccccggtggcaggcattttagcgatcttccagatccccagtggcagacattttagtgatagcccagatccccggtggcaggcattttagtgacctcccagatccctggtggcaggcattttagtgatagcccaagtcccccgtggcagacattttagtgacctcccagtaagcggtggcaggcattttagcgacctcccagatccccggtggcaggcattttagtgatagcccagatcctcgacggcaggcattttagtgacctcccagatccccggtggcaggcattttagtgacctaccaggtccccggtggcaggcattttagtgatagcccaagtcccccgtggcagacattttagtgacctcccagtaagcggtggcaggcattttagcgacctcccagatccccggtggcaggcattttagtgatagcccagatcctcgacggcaggcattttagtgacctcccagatccccggtggcaggcattttagtgacctaccaggtccccggtggcaggcattttagtgacctcccaggtccccggtggcaggcattttagtgatagcccagatacccggtggcaggcattttagtgatagcccaagtaccccgtggcagacattttagtgacctcccagtacccggtggcaggcattttagtgatagcccaggtccccggtggtaggcattttagtaaagtctcccagtcccaggcatccatttgagccattagtccgggaacgtggcatgtatgttagctatctttccaggtccctgaccggtagtctaaccacctgtaagggacagacattttaaattttggctccaggacccagcagacattttagttattcctccgttatgcggcaggcattttaactatcggttcgggactacgcaggcattttaccttcatctccgcatagctggcaagcattttaggaatctttctgctgcttggcaatcactttaaccatctcttccgctgtcccgcaagcacgtagccatcgctccactgtcctgaaagcactttgccactgtcccactgtcccgcaagcacttagccacctctcccctgtcccgcaagcacttagccatcgccccactgtcctgcaagcacttagccatcgccccactatcccgcaagaatttcagccacctctccaccaccccaacaaggacttcgggcacctctccaccgtcccgcaggcactttaggcatctgccctctccttagcccgcatctcacccaccgctccgctctggccacctgtctagctggctatcacgctcttcttccatcacgcgcttgccgcagccgcctcccgggagtggatgcaggactcaagatgcgtggatatctcggaaagtgagaacagagcaagggcgccgagcgcaagtgtgtagcgcttgcaggtacttttgggaccgagtggagcacgacgtagcgcctcaccggatcttgcgagattgcgcctgacacaagcgctgcactgagggtttgagggagtgtggggcgggacctaaggctcttgaggcgcgggatcctgctgagagggtgtggttagcacacttgaccacctgcgcagagaagagggggcagagcttaggggaacagagcatggaccttgtgggagtcacagaaaagaatggctgcaacctgagcccatttgcctttgagagctgggaaagctaggccagcaggtagcagcttgcctggtcgaatggcccttggtgagtgttggaatgctggaaacccagagaccaaagctgccaggctcagctccaacacagtctcatttgtttggtttgtggcagactgcctgcaccccaaccctttcctccccagtcttgcctcctcctgccccctctcttaaactcttacggtctcaaagactgggtttgagggaaacctactgtaatggattgatatacttctccttcaattgacaagagacttaatgtcctagagaaaaattttccttaaactgtacatatccaaatttcaaaaaatgtataacagtcagtatcaatgcaaactgagcaatctgcctaggtacctataaacacacaagatacctataaacacacaagatacctataaacacacaagatacctataaacacacctagatacctataagcacacaagaagcttatagagcaccaattagactggaacagaaaagaaaatcctcctgccacataataacccaattttcttttcaaagaattttttaaaaatatttttattttatgtgtgtgggtgtgtgcagagcccatagaggccggatgagagcatcagatctccctgcagctggaggtacaggcgtctgtgagctggtactcgagtgtttgggaatcgaacctgggtcctctgcaaatgcagccactgctcttagccactgtaccatcattttaaccccaatgtcaattttcagtccccaaagctttgctggtatgtgatacaaattttataaaagtagaaaatgaggagaacttctttgcaaagaaataggatgtagcccaagggaggaaacaaaaaaccctctgagtgaaaaaggcagattcttcaagtaaaatgaatacaaaaatccccaagaatgtgatattttggcaaaagccctctataccatccaggtctgaaatattaaaagaattagagcctttcaccaggtggtggcggcgcacgcctttaatcccagcactcaggaggcagaggcaggcagatttctgagttcgaggccggcctggtctacaaagcgagttccaggacagccagggctatatagagaaaccctgtctcgaaaaacaaaaacaaaaacaaaccaaaaaaaccaacaaaacaaaacaaacaaacaaaaaagaattctagcatctttcacatacaaaagaaagtaccgaggaaaagctggaatggagctctttcatgttcttccttgagttctttgaactgaaacaaatgatggaaaatggcttctccccagaagccatcaattctcagtagaaattcaagaagcccattcatgaaaattcatggaaggccacaggaagctgcacccaagctaatcacctacctttgccaagtatactgaaatagctccatgttcttagtatgtctactgttccgtgtgcttggcacaggtctgtaattgcagcacttgggtgtatgtggtagagagagacgtttcaggtgttcagggttatcctctttggcgatatagtgagtttgaggccaggctaggatgcatgagaccctttaattcctgcacttgggaggcagaggcaggaggatctctgactttgagaccagtctgatgtacagaacaagttctaggacagtcagggctacatagagacaacaatctgtctcgaaaacaaccataaaacaattgtgtgtgtaaaattattaaattattgagctttctaggaatttaaagctttaacagtgagatactttgcttttaaatatcaatgcccaattcattcatatttcttcaaatgaacgaaaatgaccagtatgcatatgttgttactggaatgcattctttttttacctttagaagatagaaagtaatactccaaaatatttaataaaatattttaaagatggatgctactagtgattagtattataagtagttgttaactgataacattgattacctaacaaaagttgactgtgagaagatagcatttctaggatgtacaggagaaaacatactgatttctagaaactatcaccaaattttaaaaataatatttttattaattctttgagaatttggcatgtgtactatatcacccccattcctttctctaaccccttgcagatccaccacctgccaccctctctcaacttaatctcctcattaaaaaaaaattacccacagtgtccaatttgtgctgcacgtgaatgcctggatgtgaaccatccactggggtggtgtgcctaccaaggagtcaaaaaaccgtgactgtccctctcccaaaagctctcaactctaaatagtgcttccttatgcttggaatggcgattaacacaagcttattcaggcagctacagttcacaagtacagcagttaatgtcctgtcctgaaggttttgttttgctctggtccggctttgcctatacatcacaaagtctgtttcttcttctgccatggtcactggtccttggggagaggggactgcttttgaaaatgaaggtcatgaatcgacttcaggaggcccattgaacttgtgaaacgttgtgctcaatatttgccctgtatatgctttgcagagaaagttttcttgatgctgagaatcattggtgtcagagataaatccacagtctgtaaactgttgactgtagctctctccttacttagcatatgggggatgtggttattaaatgttttattgtatgcttttcctattttgttttttggagtaatttttggcaggaaaaaaagtaataaaatgaagagtttgaagttgaaaaatataaaacagcaaccaaagggaaatactcactttagaaatgagtacattcaaatatacctgagaaatcattacattaaaactatataaagtaaagccaagtggtgatgatgcacacctttaatcccagcacttgagaggcaaaggcagaagcagagaggcagagagaggcagatgcatctctgagaattcaaggccagcctggtctacaatgcaagttccaggacagccagggctgttgcattcggaaaccctgtctcaaaacaaaacaaaacaaaacgactaaccagtcaacaatagataacaacatcatgccctgtataaaatacctacaagttaatgttaaaacacaagtcaatagagtaggggaaaggcagtgtgcatgtggggagtactcatatgtccaacaaaagtaaaaatttgccagaatcaggtgtttgtttgagggaggggaatctcaggaagcttgggatatcttgttcaactcatgctcctgcctccaccattcaagtgctagcagtataagccttcttttttatttatttatttatttatttatttatttatttttattagatattttctttatatacatttcaaatgctatcccgaaagttccctataccctccctccgccctccacccctacccacccactcctgcttcttggccctggcattcccctctactggggcatataaagtttagtataagccttcaataacaaacatgttcggccccagaatccccatattcaaagctctgtaatgtagcaaaaagtccacaagatggcgatagagacaaggtgctaggttaagtagaagaggaagttcaaggccctcttttccgcagggaaagtttgtgaaatttttcctggtccttgctctagctctgtctggtggaatgtaacaacgttggaggaagcagtttcttttttcgggaaggagaaagatctagggatatcacgctcattactttctacacttatctgaacgctatctggagtcagaaatcaaatagctgagcgcatttggatagcagtgatcaaaactctggaaagagaaagtatactgcaggggaacagcgggctgctaagtaggtgtaggtagtccctgctgaataaactaaagtagccaacgacttgaaaagaaatagagagatctgcagagaatttaagaggtttaaaaggcactgtgtacacatgtgctgattttggaacttcctacaaagctgcacgaatcaaaagtacatggaggggttggagagatggctcagcagttcaaagcactgactgctcttctgaaggtcctgagttcaaatcccaacaacaacatggtgactcacaaccacttgtaatgagatcggatgccctcttctggtgtgatctgaagacagctacagtgtacttagatataataaataaataaatctttaaaaacagaagtacatggaggtggatttgaaggtcagcagctcatattgctgatggagtttacttggagtagagtggaaaatgtggacataactgtgagtctgtgttctgattgttgcctcccagaagatcaactcagggcattaatgattgatccacttacatgaacttcctcaggcagacatttaaaaattaattatagtgttgttatctaggttatgacaacatagtcaaagccagcaaaagggatgctttgaggtgacgataggggaagatagctttgaaattttgtttctacgcattctgggggaactacaaagtcatctatgtgcccattactcaagtcatattcaggagaaagggggggtggaaaaggttgaagtccttaatctgattgtaaccagcttctaggttcacaaaggcagtaaggtgaaggacaggacaacattgaaaactgcctgcttgccgggcagtggtggactttaatcccagcacttgggaggcagagacaagtggatttctgagttcgaggccagcctggtctacagagtgagttccaggacagtcagggctatacagagaagtctcatctcaaaaaaaaaaaacaaaacaaaaaaaaacaaaacaaaaacaaacaaacaaacaaacaaacagaaaactgccttctgggtattaaaagtgtgtttcaacgaacatagagcccatctggagagatagctttgtctcccttctttttgaagtttcttttttatgtgttttggtaattaccagcatgtgtaccacctgcatggctagtaatgtggaggccagatgcttgagtcagatcccctggggctggagttacagacagctgtgagctgccatgtgggtgctggaaacagaacctaagtccttcataagatcagccagtgctcttagccactgagccatctcttcagcccctttgtatcacatctttaaggaaattctgtcaagtctagaaaacagacccccatggccacacacaacaaagaatgcggattttataaaaatttacacctcaaattccaatatgcaaacacacttcaagtaaatgagcaatgggcgtgtgagaaatctttggtatgggacaagcccacacagggtgtccttgcaaggacattctataggtctcagaactgagccttcgttatgctgctggaagccatctttatctagctccgttgagtgagagtttgcttgggaacagacctggtgataattatgtaacaggcagaaactggctgaaggtgctgtagcaagtgacacaaataaacttgttcattcttggaggaggggagcagtggggtcaaaactctgagaaagaaaggacaatctatttcccaagtggcaagattataaaattcaacctgtcacagtgacaaccaaaaatgacctggtaaacaaataggaatttaagatttgtacataagaaaaatagagccttcctgctcataatgtagatgtgcagcttggccttcatgtggatcctgaactactggaacactggaacgggggctatcacaaaagctgttgcctgtccatgggatttgttctcctagctgagttgcctggtgggcctcagtaggagaggatgcacatatcctcacagaaacttgatgtgtcagggtgggaggatacccaggggccctcaccagctcagagaagaatgggagggagaaggaagaaggatcatgggagggggggacctggagttgggggcagtgagcaggatgtaaagtgaataagcaaaaaaaaaaaaaaaaaattgtctcctggagccaggcgtggtggcgcacgcctttaatcccagcacttgggaggcagaggcaggcagatttctgagttcgaggccagcctggtctacagagtgagttccaggacagccagggctaaacagagaaaccctgtctcgaaaaacaaaaaaataaaacaaaacaaaattgtctcctggaaatccagaagaccagacagaagatagtcaaccaaagaaaagacttgagtgatactgtaatctgactgtataacacagaacaatacaaaggcataacagtaggaaagcaagcttctcattgtaggctcggtcttcagggaagactgtatcctagggcaaaaaccaagtgtttcctcgggatgtgctaaacctggtgctggcccagtatcctctgcaatgatagaattctacctagactgctccatttttcagccagcctctattcagctagactccagaaaaacaagttcagtgtttggtgttttgctatttggtcactaggtggcagtataagcccaggtttgtgctacagacttaaagccataaaaaggagcttggttggtcatatttttacaaatacaaatatttgtagtaccttggatgactttagatggatgcagtcctctgcagtgatctatactatagtttatatgtaactccaattaaaggcatttcaaatcagactggattagcatggatacatttttgggctgttagctccgttctattttgtttacatatgtttcttttttcactcttagggaaactcattccaacagtcccacagcttcttgtcagaggtcctcgataaatattaaaaggttgaattgaaacacagcaagttgtaacacatcacacacatgtatacatatatacatgtatacagcaaccatatgctagctcatagcacatggtagcccgcaaccctctataatggcatctgattctctctttcattgtccatgaagacagagaacacatatagattgagtaaataaacaagtaaataaatgatctttatacacatacctctagggaaaacaatatgaatatagctctcataaattctcaaaaacaaatttaaaaataaaaaaagaacttaaccacatagaattatactagaaataaaagcaaaaagatatagggaaaattcacaaatgcatcgaaatacaatttgcctaaacatccaaagaatgaaagaagggaaattataaaatatgaagatggataaaagcatctcaaagtagcagcagaccagaagttgtagcatggagtaatagttgtaataggaaatttatacttgtaaatactgacataaaagaaacattaaaaagacagttaaaaaaaatgggtgctgtaaatctgaccaagaacccacaacttggacactcaaagacccttggggtgatagtggtggaccatccattattattttgcttatcagacacatcgtctaactcctctctaaatacagacctccaacgggagaggctggctcagtggttgagagcactggctgcttgctcttccagagcacctgaatgcaattcctagcaaccacatggtggctcaaagcacatggtggcccacaaccatctacaatgggatctaatttcctctttcattgtccatgaagacagagaacacatatacattaagtaaataaagaaacgaacaaataaatgatcttttaaatgaatacttctagacccatggattagggtagctctcagacctccccagagacacttctttgtgtagtgaccagggctttgatgtggtcaaaatggagagaatagtatctgtagagtgtgaagggtgctcagttctaaatggagcatctatatcacacagttacatgcaaacctcagagaaaatcacttaagacaggggccatctgggctgggggttaagcagcagtgacaggaccggtgctcaggagctcacagcagctgtgattccaatactaggggaggtactcgatctaccgctgaggagccattgggagttaatggtgtggccctctgatagatccatcaacctgcaatggatgaccccatctccatgcatatatggttggttggcacaaacgggacccagtgtgttattaaaaaacaaaaacaccattaaaaaaaccaccacaccaggccaaagccatcatttttagcatcacaaaaaaaattgaataaaatgaacaatttcttcgactctatcagggaaataacattccccaaattacaaagtctcttagagagagcagcgacttgctgatgagtgagaaaacagctcctgtccacagacagtgtgaacacaggaaaacaaactgacgctttcttggaaggtttgtttgaataaatttaataataagataatccaggctatatccagcgagcaatacacttttgtgacttttcttcataggagccctagagcatgttttttagtgaaaatgatctccatagggattggaacagaaagagaaaaggaagcattctgaaacacccccatagcagtctgctctcctagcttcagcctcagacaaacgtgactcattagaaattcaagtaactgagtcccttaatccccaggctgacatgcaactcctgagctcgaacattgccccaccttagctttcataagactcaaaccgacctgaagggagggaaaaaaaagcccaattctagcccaccacgcttctgcttaaccgacgggaaggaaaactgtacaagacccaagaagaatcgctgtgatgaccacagttgagtggcatagatacagctaatgaacaccctgccaccatcaaggcctcctgtaatatcagagaaatacaataacgtgtcatacaactcagaactaattcaagaagtctctagagcaaccaaagcaacaaattaggaaaaataaagacacttggaacattctccaacctgggatccctctggctgtatcaaacagtggacacatggtatagccctcattttcaaccacatcaaacactgtatgtaaagcttactaaaacaaaaaaatctcagctagaaaatacagatcagaaccaaattcaggcgtggtagacatctgcaaggattagatggtacatctaattatgattaacatggtaaaagtgctaaaacaaaacaaaacggtagactggttttgacccccggacaagggacagaagtgcttattttacatatcaatgcagacctggcttccaggttctactagcagcgttcagtccctgcctgatataccttgttcccaaccttgaactttccagttcaggggcttagctgcccttccacaagacgttctttccaatgttatctagacattttgcgccccacccttctcctctctgcacgagcgcaccccttcttcccttttctcctctcccctctccccatggcaactcctcaatccttgaagccagtgaactccccgagagcagttccccaataagcctacctttaatgcaatcggacttgaatagtctcgtttcacgggcagagaagtcattgatcggagacaacatgcatgaataggagaccaacaccatcaacacaaccgatgctcaaaatcaatagcattaagaagtgagcattcataaagatttggaagctaacacttcagagcacactccagaagaacaaatggggtgtgaggggaagggatttagttagggattttgcttgtcattggcggtgcatctctgcaatcccccaaatctggaaggctgaggaggatcagaagctcaaaggctgcctggaatgcgtggggagaatctccctctaccaataaagagacaaacaatgccagacaagcagaatgtatcaggagacaactggaaatgggataaagatacaagataatacctaaaacctaatggaatgaatgaagctaaagccgcacaaaggtgtgtgtattggggggtggggggagttacagatgcgcattcctaaggaaggaatctctgagtcaccaccacctgcaggaaaaccttggcagaaaacagaaatgacaaaggctcgagcgtaaatacaaaattttaaaatgctgtttttcttgaaaaaaaattttttttaagaagctgatgaaactaagctacaccaataacaaactcaaatcacgtttgcaaaaggagaccttacaatcagtcaatgcttaaaatctctcaagagccgaagcagaagggatgctatctaactcaattcatgatgccagagtgatcctgatatcaaagccagaaagagacacaaaagaaagttaaaaatttatagcccacatccctgatgatcatcatcattacaatatccataacccgagtttgatggaattaaaatatccaggtgggatttactcatggaatgcaagaatgattcaacatacaaaaatcaatgaacacgatatcaccacaatacaatgacgatcatcttgatagcattaaaacaaaaacaaacaaacaaacaaacaaacaaacaaaaaaacccacggggctggggagatggctcagcggttaagagcaccaactgctcttctgaaggtcgtgagttcaaatcccagcaaccacatggtggctcacaaccatccataatgagatctgatgccttcttctggtgcatctgaagacagctacagtgtacttacatataacaaataaataaattaaaaaaaaaacacttggaaaaactcagtgtactcatgattaaaaactctcggtaaaccaggaataggaggaaattgtctgagtacataagggccacattgaaaaagcccacagctaacatggtcaatggtgaaaaattgagtgctttccctttaataagatgaaggaaccaagaatgtttgctctcttagattccaatcctaatagaattgatggtcctgtgcagaacagttggggaagaaaaggaatccagggctgggactgtaccacagtctgtagaatgcttttctctagaatgcataaagccctatgtgcaatcccaatagtggtacaagcctatgaccctgatactcaggacgtagaagctagaggatcacaattcaacgttaccctgggctaaagaccctgttttactttattactttttttttttttaatatctgaattgtaactgactggagtactctgctcacaaatgccatgattatttatgtgggggacttacgaaagtctacacacacatacacacacacacacacacacatacacacacaccatacaactcaggtaattcagctgtaaagttataggatacaaaatgagtatataaaagtgaattgagggccactgagatggctgagcaattacaaacacttgcccccaagtttgaagacctgagtttttgtttgatacagccctggctggcttggaaattactatgtagaccaggctggctaccaatttatttaagatctgtctgcctctgcctttgagtcctgggattaaaggtgcaagccactacagcaaacttggtgttatagtttaaatatatggtttactcctagcaacttgtatgttgtcttggtgctgaaatgtggtggcatctttaagagggtttaattaatttctcaagagcctagctgagttcttggattttaagaagaggttgctataaaatgatcctagcatctacctgatagctcttgtgcatatattatactggacaaaatagatgtttccctaccacaactctcctatgagttaacactgcttccaaccagaaactgagaaaatcctggccagcacagtcttgaatgtctctgtttccagaattgtgacctaaatttatctttactattcatgacttaatctaggttgaggaatgttgctataacaaaaaataatctgagataattgctctgactagaacatttaatattgttaaaatactacttctgttcaaagtgatctgtagagtcaatcaatatctatcgcactcccaatgggtttttgtttgttttctttttgtattttggaagtagcaaaaataactataaaatacatatagatgcgtgaagacccatgaacagccaaaataatcctgaaaaagaacagctcttgtccaatggaccttgggggaaaccaaacgtcacattttacacagagcaggataaggtattggttttcattttgcctctccagaacacaaaacctagatttttttgtttgtttgttcatctgttttaatagggcctcatctttagcctgggcttaccttgaatttggagtctgcctccctcagttgctatagttctgggattataggcataaggtgcaatttccagcaaaaatcctttaagggctgcttgaaactcactatgtagctcagcctggcctcaaactcataaccatcctctcaagtgctaggattacatgaatgagccacagtagcagctaaaaccctttacattttattagggtatattctatacaatatgagtgccattataacatcacatacacgtaagattttgttcctattcactcccattactctctttttttctccctctcacttttactgatccccttactctgctcacacacttctgatttctggtttcttctatagcatggatgaagggttatttacaggaacatggcagattcttaccgaagaaagtatccccccctcccaactccctcagcaaacaataactactaataccccttctgcagggaggaatgaggcatcttggtcccttacgtctagacactgttaactgcctcctcggggagggatgaggccttgtgagcctcttgtagcaactgttaacttcctacacatcctaaggaatgtgggggtccccttgtatacacaggccttgggtagggtaatcataggtgctgtgagtttatgagtatgactgctgctgtatgttccacaataccccatcccttcttccagctttacctttctgccctctttgctgtggtgtttcttgaaccttgcaagggaggagatgcagatcccattagggctgatcttcaacaatcacacaatcacatattcttttttgtttgtttgtttgtttgtttgtttttttgagatagggtttctctgtgtagctctggctgtcctggaactcactctgtagaccaggctggcctcgaactcagaaatctgcctgcctctgcctcccgagtgctgggattaaaggcacgcccagccaatcacatattcttatgactcagagctaaaagtctgcacgaacagaaactagtcttaccaaagctgacagtagcacaaatctacaggtataaacatacatggttagaagacaatttgatagtcataaggtggccagctagggaggcaatagtggtaaagcttctccattagagcctatggtctccccagctagaggcttttgacaaggcatgaactttctcctagcaagtgagcctcaactccaatcagaaagttaattagccaaataaaaaaaatggtaccctgtgctcagcttggcctgtgagtaaatctgtgggacattttctcggttaacgatcgactgggggggggggcagtccacttaaaccatgtgggtggagccacccatggacaggtggtcctgggaggtatgaaaaagcaaagtgagcaagccatggggagcaagccaggaagctgtcctttgtggttcctgccctaatttctactgtgatgtggaagtacaagccagataaatcctttcctacccaatgtatttttggttagaatgttttatcacagtaatagaaagcaaactaaaaactaaaacatctttctaactttcatgccacagtttctttttcttcctttcttttttcttttctttcttttcttttcttttttttttttttttttttggtttttcgagacagggtttctctgtatagccctggctgtcctggaactcactctgtagaccaggctggcctcgaactcagaaatccacctgcctctgcctcccaagtgctgggattaaaggcatgcgccaccactgcccggctgcatttttttttttaaattaaaaaagttgaacctaggtgtgttgtctcgtgcctgtaatgcccatgttcaggagagagagagagggagggcagggtgattactatgacttcaacatcagcatgcgcttacatcatcagttagaggccagtctgggatacagagtgagaacctgtctcaaaacaaaaacaaaaaaacaaaaaacaaaacaaaacatcaactatcataagtgacttaaataatggatattaaacctaaatatcacacaacttcacttaagaaaattctgaggactggaaagatggctcaatgattcaaagtgctttccggaggaagcctgaacaccacagtttgagtcctaacacttttatataataagctaagtgtgggcccatgcatccctataagtccagcactgaggctagcagagactggaggattaacaaggcaaacaggcagacacggtaacagcctcttcatgcatgcactagctcacacacatgagtgcgcgtacatcacaaacacaagcacacacaataaatacatttaaaagttttcttctttctttgtaagtgtgaaaattacaaattgtagaattttgatccagataagaggatcaggagtttgaggctagcctgggctacataagaccctgtttcaaaaaccaaactaaaccaaaacacacacacacacacaaagttgacacaaattttcaccatgtattcgacgtgtcaaggctcacctgggtcatgcaagactaaataaattaattgtaactaaatgcaagactaaatgtctaaagtatttttgaaagtctggcttaatgcaatttgcttcggtgttttgtcagatgacaagttagataggtcattccatgcttgtttacgaacaagacaagtaaaatttctcgagtctctgtctcttggaataggtctttccactgtaggtgggagggaaatgtttccgtctcccaagtgctggaatttaaaggtgtgggtctggttgaactcgttttttgtgtccttcagtggtcaggtgccccggctggtgggtggggtgggaggaggagtatctgtctctattgttcctggactgatcctgaagtgtaacggaagtgaaaggaaggttgagtggagggctagtggacagtgactggcccacaacactacctttaagaagacaaatggaccatagtgatgtacacctataatcctagcacccaagaggcagaggcaggaggatcactgagttcaaaaccgtcctgatctacagagagagagagttcaaggacaaccagggctatacagagaaaccctgtctctgggggggaaaaaaagcaaggaaaaaaggaaggaaggaaagaaagaaagaaatgaagagaaagaaaaaagactaataggtcccagagactcccatgacagtgggaaagaagagtctgcacacttcctcctgctggaattcttgataagaaataacctccagagaaatggcaatcatttacaatttataccacaaattatactacactggaacaccatagtaggccttaggagaaaaacagacgcttaaacatccctacttggaggctttttgaaaacaaagtaaattatctttactgagcaagaaaacacttggtgtctaggtaaccctgtagcatgtgtgaaacaaaagactattgcccagacagagcctcaactttctcctttctattaaattcacagtaaaaagcaaacatgtatagacataagtaataaagtcaggtgtaggcataaatcaccgcatcttttctacaaaagtgagcttaagcgttttacctttttaggacagagtgaaaatccggaagttgtcttctgattgttacatgctgccacggtcctccctgtcactgctgccattgggctatggcctggtgtctgtactcaaactgaaaacttgcaagctagcacacgtgctggcggagtgtggacgcacgggtacacgtgcgcacgcatgaacacacacacatgcacacacgcgtgcgcacagacacacacacacacacacacacacacacacacacacacacacacacacacattttgcgcatgcgtacagatatgtgcgtgcgcacacacatacaggcacacgcacacatgcaagcgaataaaattaaaatatggtaggcgcatggtagaacatgcctttgatcccagcatttggaggcagaagcaggcagaactctgaatttaaatccaatctggtctaaaatatgagttccagttcatccaggaccacgacaaaaagaccctgtctcaaaaacacaaatcacaaaatggcaaaatgaaacaaaacaaaatgaaaaccaaataaaatagaaataagaattctaccttcagctgagtgtgtgtttgtgttatatatgaatattgtgatgaatatctgtaatcccagaactgaggactttgagacagaagaattaggagtttgaagccagcctggaaaagatggccagattatgactgtttttctaaataataagtaaagaaataaagaaaaggagaataacaaccaagcatggtgataaattcgtgacctcatcttctatgtatatgatgtaaaagtcatgaagtaataacctcttacaatattcaagtagtagctttacttggaaagaaagattttaaaagaaattttattttttagacagtcaaaaatataattaagaagtatcgtatctgtgctaagcagacaatataaaattcgggaacaaagaacatatatctttatctgtttgcttatttttatttatttatttatttacttacttacttacttacttacctacttattggagacacatttttttctatgtaacagccctcactattctggaactctccctgtagaccaggctggcctcgaactcacagagatttgcctgcctctgcctcccaagtgctgggattgaaggcctgtgccatcactgcctggcactttttctttctgtctctgtctctgtctctgtctgtatctcttccttcctttctgtctctttcttttttatctttagtatttttaaaggcatgtttttatctgctagctatttatttttgaggtagagtctcacgatacagcctcaactagcctggaactcagaaagagccatcttcctccccccaccacacctggcaggttccttttaaagacattacttctcaactcaaataatgctaaaatcaattgagctgtttatcatctgactattgttggttagctagaaacttctgaagtgttgcaatgtttagctaaagtctagaatttgctgtttttccatgtgttaagtgtcaggaaatgcgaggtaggtaagtgtttgaagatagtgtctgccattatacaaaatgctgagtgataggctgattgagtgtacaaccaaacagatccagatagtcaccaacttatttattagttgctggactggtttttaccaaactatgaggaaaagtaggagggataaaaaagagtaatagaggggtgaatatgcaattatgttatatgcattatggaaatagttaatgaaatctttactttgtacaaatagtatacactaattaaaaagatacaaatagctgatatgcaagataaataagttttacagatctaatgtatacatagcacaggcactacagttaatgatactgtgttagatcctttttaaagaaaactctagttttgctgagcgtggtggcacacgcctttaatcccagcacttgggaggcagaggcaggcagatttctgagttcgaggccagcctggtctacaaagtgagttccaggacagccagggctacacagagaaaccctgtctcgaaaaaacaaaacaaaacaaagagtactgactgctcttctagaggtcctgagtccaattcccagcacctacatggtggcttacaaccatctataattccagttcttaggggacattgacaccttcttctggcttctgtggacactgcacagatatggtacctaggtatggcagccaaaacacccaagcacataaaataaagataaataaatatttttaaaaagggggatgggggtggacagatggctcagcggttaagagcattgactgctcttccagaggacctgaattcaattcccagcaaccacacaaccatctgtaatgggatctaatgccttcttctggtgtgtctgaagacagctacagtgtactcaggaaaaaaatagtttttttttttttaagaaagaaattcagatatctgctgtattgtactctttattactgccaggacaaaatgtccagaacgataattcaaaaatagcccactgacttttcacgtgctagaaggtagaaagtgatagcagatttcatgccatgcagatgatccctgtttccacagaggtgcttctctcacaagacagaagaaatggaagagcaaaagacacaaccaggagtgtacttttagctgttcttacaaggacagggacagtaatcgagtcatggaggcattaccaaatacatccaaaaaggccttatctttcttgttgtttttgttcggttggttttggttttgaggcaaggtttttcggtgtagttctggctatcctggaattctggagtcaggctgacctcgaactcacaaagatcctcctgactctacctcctgagtggtaggacaaaagccgtgcaccatctgatcaccctactcatgatgtgtgcatgcacacacactaataataacaagcaaaaaatatctttaaaaagtctaaaaccacaactttgagacagacattaggtagacatacttattccaaaagtcagaaataggaaagaagaaagggataaattacgccaaataagccccagacatggcagggcaagagttcgttctgtgtgcgcacgtgctccaaagtgtttcattacagttgctttcagagtcctgggtgaggggattatttgtaggagaatggactccctacaagtagttacacactcagatcttctctccctttctcaccaactatagaccccccagggaggggtggggtaacatcagctcctcccaataggggaaggttttgttggtgttgtgttgtgttgtgttgtgttgtgttgtttgagacagtctatcactatgtagcctgattggcctggaattcatcaggtagaccaggctggcatctaaatcagagattcacctgcctctgtattttgactgctgggattaaaggtatgtacaccaacatattcccctaagaggggatggatcccagggtctagatgccattgctctctctcccctctctctttataaatatagttttaagatttttacttgtatttatcagtacagggggtgggttgctggagtatgccagaagagagtattggatcgcttggagctagagttacagggaattttgagacatctggggactgaatataagtcccctgaggagcagcaccccaacatggtaatacttcatcttaaggctcaagagcaaactttggctccaagttctgcctctagacacacggagcgccatttgggttcacagggctctaagcttgcctcgctaggcacgctgacacagcacttcttgtcagtcggaaccagttgctggcacctctcccaagctgtttttgcatactggtggctctatagctctggcgtcataactgagagcagtgttttcatagctcttttgggcattgctctcattgggggtctattctctgggcaaaagtcgctaagcactgtgctggtagagactttatatcagccttcctctggttctctgcttggctctcaaaactcatggaggaatcctttgaaatctaggtgaagctagtcatgactccacagctcatacgtttggaggcagcagttccttgctaaattctactttgtgtgcattaatgtctcctaagcaagtctagtagaaaatcctttataatatcaattgtagtacttcaagtttcttccgcatcacggcatcggctgagtaacagtcccccagatagatggaacaatagaagattacaaagtgagaaaaggaaggaagtagaaaaactggtgtttacttggttccagctgttttctgattcaggaagaaaggggccgggcatactctacccatttatagtaagaagatttttttgttttggtgggtttttcgagacagggtttctctgtgtatccctggctgtcctggaactcactttgtagaccaggctggcctcgaactcagaaatctgcctgcctctgcctcccgagtgctgggattaaaggcatgcgccaccatgccaccacgcccggcttgtagtaaggagatttaactgtaccatgtaaggcaagagctcctcatgtcagagttcaaaaagtaaatgtgctgaaccatcacttggtttagaacagcttaagcccccagcccccactccaccccaaaccaacccttgactgtttaattgctgataaggaataaaagccctttcctataaaccactgtttgtttgtttgcaacgaaatcagagatttactatatggatatttaaaaattcagaatttgggggctagagagatggcttagaggttaagagcactggctgctcttccagaggtccagagaacccagtttcaattaccaacaaccacatacagatcacagctgtctgtaacttcagctctaagggatcctataccatcacacagatatggatgcaggcaaaaaagcatcaatgcacatggaataaaaataaataaaatttttaaaatttggaatttacaaataatgaagatccctcactggttcagccactcaccgaggtacctcactccagcaatttcccctcaccagacttattcatttttaaagtttagatgtttgaatatttattgtaaaacagcaagcacaatgatttctatttttataattggtgacgtgatctggaaaaatacttctaattggtaaggcaagagtgattgcaatgcactcttcatttttttctaacttcttaaagtatcttcttttttaaaattaaaactttattataggggctggagagatggctcagtggttaagagcactgactgctcttccagaggtcctgagttcaattcccaggaacctcatagtggctcacaaccatctgtaatgagatctgatgccctcttctggtgtgtctgaagacagctacagtgtacttagatataataaataaatctttaaaaaaaacctttactggaaggagttacagagacaaagtttggagctgatacaaaaggatggaacatctagagactgccatatccagggatccatcccataatcagcctccaaacgctgacaccattgcatacactagcaagattttgctagaaggaccctgatatagctgtctctagtgagacttcgcctgggcctagcaaacatataagtggatgctcacagtcagctattggatggatcacagggcctccaatggaggagctaaagaaagtacccaaggagctaaagggatctgcaaccctataggtggaacaacaatatgaactaaccagtaccccccagagctcgtgactctagctgcatatgtatcaaaagatggcctagtcggccatcactggaaagagaggcccattggacatgcaaactttatatgccccagtacaggggaacgccagggccaaaaagtgggagtggggggaagggtatgggggactttttggatagcattggaaatgtaaatgaggaaaatacctaattaaaaaaaaaaacggggcctagcaaacacagaagtggatgatcacagttagctattggatgggtcacacggcccccaatggaggagctagagaaattacccaaggagctaaagggaactgcaaccctatagatggaacaacattatgaactaaccactaccccggagctcttgactctagctgcatatgtatcaaaagatggcctagtcggccatcactgcaaagagaggcccattggacttgcaaactgtatatgccccagtacaggggaaccccagggccaaaacgggggagtgggtgggtagtggattggggggggtgggtatggcggacttttgggatagcattgaaaataaaaaaaaacctttactataaaaaaacttgcaaataaaaaattacccaccggagctaatgaccagatctttaatagttttgttttttatattgttatagtgtttgtgttctcagcacacttaacaaaagcaacagaaaatataagaaattaatctactcaactaaactaattaaagtttattttgagacaggatctcactatgtagtcctgaactggaactcactatgagcagctggcttttaatttaaagacccacaggtttttgcctcttttgcctctggagtgctgggattaaaggcatgagccagcagcatcccagactacattttaagaaagggaaaaaagctggtcgccgggcatggtggcgcacgcctttaatcccagcactcgggaggcagaggcaggtgaatttctgagttcgaggccagcctggtctacaaagtgagttccaggacagccagggctacacagagaagccttgtctctaaaaaccaactaaccaaccaaaccaaaaccaaaccaaaccaaaaaggaaaggaaaggaaaaaacgaggtaattagcataattagcatgacaaggaaggggtagtgagaaacagtgacacagaaacgcaaaggtttcaagcagaatttattggaagtttggcaagcaacaaacaccctagttggcctgtagatgactttagattgttttgcggtgattttcattttgaagaaggatttccaattttcaaaacagccaggctcaaattaagtattttccatttattttagcagtttggtatagatttgttttcggcttagtgtgtagagatgtttgtttgtttgtttgtttgtctgttttccatcaggacttcatttatgcatgagggcacaatggtagctgatggtgacacgtttctgcctgcctgcttaatcagttgggttcatggcaccatctgtggaagaaaggttttcaattattctctatttttcagtaatgcctccctcgtgaacatctttagaaaaggggccttccaaggtctaccaagtcttatcgattctctctctgtgttttgttgtttgggaggtttttctgtgtaatggccctggccgtcctggaacctcctttgtagaccaggcagactttgaactcagagagatctgcctgcctctatctcctgagcactggcattaaaggtgtgtgctaccgccatccagctgattgcttatattaaagggcaaacatcagtgtttcagctatattagatgcctacgtgaaaaggcagtatggggctggagatgcagctggttaagttgcatgctgtcaaacctgtgagggtgcatacgtgtaagagtacttgccaatacaagcaatgctaaacagttaaatgtctgtttccttctttacctatggatgttgtcattggtttgctttgtaaactatagttttgacgctgtgaaagacagaaggcactacagaaactacaaaatccttttcctttgtgtgaaatgtgaaagttttaagaaaacttataaagaaattgcactgatttgattactaaacgtcagttctacttaatgccaagcttagccaataactatttacctcacttctttccaggaaaatgttcatggtattttattattattttaaaaattatatgtctctgtgtcacatgagtgctatatctgcccagctcttgagctgtttaaggtttactgtaaatgataaaagttgtatgttgggctagagagatggctcagtagttaagagcactgactgctcttccaaaggtcctgagttcaaatcccagcaaccacatggtggcttgcaaccacccgtaatgagatctgacgcccttttctggtgcatctgaagacagctatagtatacttagatataataataaataaatctttttaaaaacagttgtgtgtcttttatttaatttatacaagtgctagtgcctacaggggtgataggaattgggtctcctggagatgaaattataggtgattgtgagcagcttgacacaggtgctggggatcaagcttgggtcctcctctgtaagagcaatatgagcttttaactactgagccacatggttttagttctttataggagacactgttttttgttgttgttgttgttcttgtttttccccctccgttctgccaagtcctggagagtgttcgagaccgtgggtctattctatattctcagagctcaattgttctggaaagtcagagcctaagaggtaggatctcagaagtaggactggctgtggattggctgctcagctcttccctagcttctactccttcactgtgattgtagcttcagggattctggctccaggggcagcagtacagtttagtgcgatctgaacattaggaccctataaacttgtactgcttcagatcctcccagttccttcaaggtctcatttcttttttttcttgataactattactcacaatctggttcctacaggtgaaaaccttatctactccccagggatctcagctgaaccagcctgctggggctcctccttggccagattcaagagccttggacttggtttgttaacaaaggggagaggaggggctgcttatctggggatgtctgagtgggaaaggacaccagggacagtccttgagctagagtcctcccttgtggccaaagtacagtgtaatctgtgggaacagtgaccatttgtgtctcttccttacccttgatgttctttgattgcctagaccatcctcggaatgggatagggtgccttctgtctcctggatactgggattgcatcatactcggcttttgtagtactaaggactctaaccaaggacctcattcatgcaaggcaagtactataactagtgagctacatcctgattatccctccattgtcttatttattatttggttagttatttatttggtagggtctcactatttagccctagcttgcctagaacttgttatgtagaccatgttggccttgaagtcacagatacttgtcagttgcctctctgagtgctggagtgctaggcttaaaggtgtgtaccctagacctggcttccagtgcctttaaattccctgtatgtatgtcaggctgcaaggatgaaatgtgtgacttcaataacaatccaaagggcaagaaagatacctgattcagtttcttccaggtcttggtcagcttgtgggttctgatcagtgaacatctccctagaatatatagtgtaatcaattgtcaataggctaaatccaacaacttagagagacatgaaaatcattcatgcacacacatgaaaatatgacccatttatatttgaactaagacaggctatctacccccaccttctttgagacaggctcttactatatagtcctaaccagcctagaagccactatgtaaatcatgctctacgtagctctcaaaaagaaatctggaagtggcaatgtggtgaggtagagacggtgatggagagctcaaggccagcctttatcccaccagcagtctgggaggcagaggcaaatggaagctactatgtggagcaagttggcctagaactcctgcttctgcctcccaagtgctagaatgaaaggtgtgcactatcttacctgactatttttccattttaaaggaaaaaagacatcaaatgtgagcctccccctgccagagcctgacaaatacagagatggatgcttgaagccaactattggactaagcacagggtccccaatggaggagctaaagaaaggactgaagaagttgaaggggtttgcaaccccacaggaagaacaatatgaaccaaccccaagagctcccagggactaagtcatcaacaaagagtacacatggctccagctgcatacattgcagaggatggccttgtcatgcatcaatgggaggaggggcgcttggtcctatgaaagcttgatagatgccccagtgtaggggaattgagggtgggaaggtgggagtgggtgggtgggtgggtggaggaacatcctcatagaagcaggggagggaggatgggataaagggtttcgggggggagatgtggaaaggggatataacatttgaaatgtaaataaagaaaatatccaataaaaggaaaaaggaaaaaaaagaagaaaaaatgtaagcctccactagcacatgacaaatgacagtactgaaaggacagagcatgaaagttcttctctaggacattgcttgtactcaagagcagtcacatgaatacaaatagacttagggtctcttttactctttgaactctctgacttcctacaaaaatgagagccaggcccacaaaaacaaaatcctacataatttcataccaaaatcatctgtgagaaaaggtacacacaaaacagagtagacaaaaacaatctatcccataaaggaacagcagcatattgcaactgatgtgtggaactacagaccagatcactacaacactatgtcattacagacttcatcatcttcctacgttgcttctcaactgataccaaggataagactaagcacagttaatggataaccaactcctattgtatttctcctccctggatttcccataacccaagaacaattgagaatacatacatatacatggaggggcttgctttaatgttgccagtgatgactttcacattattgtctatgtctctgtcactgtgactggtttcatcatcttcagtacatccctatggagtgataaagacacaggggaaagtcaaaattgaagtagataatttttggctgtcaaaggaggacttttgtcttaatgttaaccctagagttgatagtcttaactgatgagaataaagttgggacaaagcttagtaaacagttgtaccttatggactactgcttctctcccacatcaagatcattagtgtagataccttgataagttttgagaaaatgggccttgggtacagtgttcttataatggtagattgctcacattaatgaaagcaccagataccctgaagaagtttgacttggttctagaatattttagtggctttggttgctgactataatcctcaattggcttttattactgctcacatttattttctttctttcaaaatcccaaaaggaaatctgaatgtggcagtacacatctgcagtcccagtactgatgaggtagaggcaggactgagggctcgaagcccagtttttaatcccaccagccctcaggaggcagaggcaaccagatctctgtgagtttgagggccagcctagtctacagagtgagttgtacagtgagaccttgtttcagaaataaataaggaaagaaggaggagtggagaggattatatctgtctaggtctcattcaccttagctccccagggctagtgtcctggcttcagggtaggcaaatagcagctacttggaaagaatctttactttggaagtaaatcctcaattttcatgtattctatattagcaaatttgcaaatattttaattgccttttggtcatttcagacacgcacagagaggtgaacaatttgtcacctggtttcagctctcaaactttaagcacacatcctctacattgttcatctaatatcacaatttccacatttacattccttttgctggcaacctccaccccaaggcatagtgctaaaactctatgcggtgtgtctaagcacacaaggctgtattgatgctgtgtcttgttcaaattttaaagtgtgtgtgtgtgtgtgtgtgtgtgtgtaagagagagagaaagagggagagggacagagagagagagagagagagagagagagagattggctctcaccttctaccttctctgggacagggtaagtcttatttctgccatgctgcgtagttcaggctaactggcctacaaccttccagaccattctgtctctgcctctcacctcaccatagacattctaggatcacacattcaaggcaccacatctggcttttaaaaacactttttatgggctaaaataccttttcacagacacacactttagaaaatgatactaaaaatacacagtgcgccagaagctgaatgacacacaataaggtagaactgtcaccgctctttctgtatactgtgcttcaataattcggccaagaataaacttgctacgtgtgcagttacactttagtttattcatggtatatactaccaaggaaaattttgggggtatataattaaacacattatcagtttgtttggatttttaaaaagctcttctcgcatacataacattctgactgcatttcccctccttccagtcctcctagttctccacccccagcccagccccatgagctcccctctcccccagatttgtttggaaacttttaaagtgaggctttcgaaaatggatgcactatgggctggagagttagcagagcacttagtagttctcactgctattccagaaggcctgagcttaatttccatcacccacattgtacaactagctcacaagctctttttgtttttgttttttgtttgtttgtttctgtttttgtttttttgagacagggtttctctgtgtagccctggctgtcctggaactcactctgtagaccaggctggcctcgaactcagaaatctgcctgcctctgcctcccgagtgctgggattaaaggcatgcgccaccacacccagctgctcacaagctcttataactcctaactataggggatcttctgggaaacaattgaccatcaattaaatacaatcttagcgtgattcagttttcagtggacatcattatcattatcattatcattatcattatcattatcattatcattatcattatcctagtaccatatctattgcatcatgtttagagcttatccacccttgacatttgtgttttttcagagtcccatcttggtgtgtttctgtcttccttggaccacttacagcttggcaagtgtcctcatcatcggtactgctgactctgtcctcctgaagaatatcttgcaggtgaagaaattcggcagcgctagagaaaaatgtcataataataaatacactggagagtcatttatctcaatgacagactacatgcaattcagaaaccgacatactaatctgttgcttaaagtaaaatcaggggccaaataaatgattgaataactatgatttacttcagaaaaatgccttgaacaaaatctaaaagctgaagcgtgtcacctagagtaaccttttcattgtatagattaaagaactgaaatagtgaggtgaatctgttttttgactataactttgttgcacttctactggcttacttgatatatgtattttgttccccaaacactttccttttaaaagcttcagttttggaattttatcaagtttgttcttgttttttgtttgtttgtttggtttttggtttttcgagacagggtttctctgtatggtcttggctgtcctggaactcactttgtagaccaggctggcctcgaactcagaaatccgcctgtctctgcctcccaagtgctgggattaaaggcgtgcgccaccacgcccggtttgttttttgttcaggtcacaatcaccagcctaattttgattcccaatattcttttttttttttttttttttttttggagacagggtttctctgtatagccctggctgtcctggaactcactttgtagaccaggctggtctcgaactcagaaatctgcctgcctctgcctcctgagtgctgggattaaaggcatgcaccaccatcacccggcgattcccaatatttttaacagaaacagatttgttcctaacagtagtccctaaatgatttaactatattgcaatttgggccctggatcatccacagtggagaatgtgtgcttttcaaggcagtctagaccaagattctacaagtaggtgtggctgtgcttgtgttcctaccctctgttttcatgaaacaaataggctacattttctcctagagtttctgggagttccattatcagttctctgggacactgtgcctcattcactagtcttagcaactagaatgcttctggccttgggaacatcccccatgaaaactgagtacaaaagagaaattgatatctaccatgttcataacaagggtttcagaacactgtgggaaataaaagtccaaagaaaattttttagtcttactgcagtaacacttttttaaaaaactcacagcaacttaccagtttcaatccacaagaagactaaaggctcttttctttttttggggggggggagcgtcatagattcccggctactgctctaggatgtctcatggaagtgtacatttctgtgctgagcatcaaattgtgtggcaaggtcatgcaagatgtatttcttgttcacttgggtggaaatcagctgctgacaccaaaggtgaccattgctgatgtgaagaaagtgttgcacaacttacctcagtggctcatctgcctgatcgtcggtgtcatcatctgtgatcatgaaaaatcaaatgtgaaagtgcagctaggaagcaaagggtggtagaaaggaggggttgggatcaaaggcctcttgagcttaaactgctgggtgcaggagactgctacctgctcaatgatattgttgaagctaaatacaacagagatttttttgtttacaacctgtggaatagttagttggagattggaccctttaaacaagcaagaatataaaaagaaaaaaaaataaaagttgtcgtttactaccttttttagtgttttaaattttgtatttacacataccaaaaaaatagtattttcatttattgttttgactatttgtaagtaaacttggaaaaagatcccttcagcattatttagcactttttcaaacacattaggttcttgaaatgggtgaaggaaaatgagcttaaagggggatgcagaacaaaaaggtacctgagttcctcttcagaccgggcccactccagcactaaaggagagaacccgagctgctgagttcattcccatgaaggcttaactgttgggttttggttttggtttattttttgtttttggtttttaaagacctagactgtcaacacataaataaaaaccaaaatgacaacaacaacagaagcaaaaatatcaaggtgggggttgggggtggggttccaaggtgcaatacttgcccagagcagaggacggcccaggctggaatcccagaactgcgaaagaaacaagagagaataaaaaggcaaactgaggattaaaacatacacagactcaaatgcaaataaaacttgtgtttaatgtgttagaagtcaaagcactttgaaaatatcctcacatgtattccatgttttaggaggtataggagcaagaatatatagattttatgggctgttatggaggaagcttaaacaactttattgatattttgtttgtttggaggtagggtctcactgtatatagccctacctggcctggagttctctatgtagaacaggctagcctcagagttaaagaggtttccatacctatgccttccaaggggctagcattaaatgtatatgctaccatatctagctcactttctgtttcttgttttgttttgtttttctcaatgcagagtttctctgtgtagtcctggctctcttggaactcactctgtagaccaagatggccttgaatttagagatccacctgcctctgcctcctgagtactgagattaagggcacgcacctccactgcccggcttcccgcgtactttcttttatttttttttatatattttttattacatattttcctcaattacatttccaatgctatcccaaaagtcccccataccctcccccccccactcccctacccacccactccccctttttggccctggcgttcccgtgtactggggcatataaagtttgcctgtccaatgggcctctctttccagtgatggccgactaggccatcttttgatacatatgcagctagagtcacgagctctggggggtactggttagttcatattgttgttccacctatagggttgcagatccctttagctccttgggtactttctctagctcctctattgggagccctgaaaatgaatccaacgtatatgttaaatgtcttagtttataagttttttgttgttcttgagtaggtccttcagtttgatttaggagcaataccagataacccacattcgaggagaacgtagaaagaagatggtaactgcaggctcatactggaacattctaatctataaaagacaatcctttccaacagtctaccacctccaggtccacatggttaactaacactgatttaattcattcgcaaccgtctgtgtcattctggttgcctccagttaaagggaatctctggtttagtttgacagctttggagaaaactaaggatcctaggatgatattacttagatatcaagggagaggtggcatgagaaatgaaaaccctggggagacaggagatggtttcccctttgctcctggggaatttgaaagaaacagtgtccctggactcgtgcccagaggagtcactttcctctttccggtaactataaaaaagtaagtaggtttttacctttgaaaagccagttttcttcatcctcgaattctggcaagtccattgcactgcattctgcttcagaggtcttggggctttgcttttcagacatagctccgggattcggcttctgtggagggagaccttgttggtggagctgatacccaagtctaggtgggtgctgtgaataaaggcctgagggcttgggccagagcttcaagtttttatcacagctcgtgctggggtggggtcaagttgagggggcggagtctggagagcctcgggtattgggaatgggtagaaccagagaatgacacacctctgtagtatcctaaatgcctatcttccatggaggtcttagaaaacattgacctctacattttccttcagctagggtaaaagtattaaggaaatctctgtgatctagtgagtattggcatgaaggagtaggtcctgtgtacttctttttactgatcaggtattagatcttccaaccatggagcttgtccttcccaatctacccttccagtttccagcacttgtatagaataggagggtgggtgggatcagcaggcagtggtgtaggaaggggacagtggttgggaaccagtagatgggaggtgagacctagaggtgaggaaatgggccaggagcaggcagggagttctgcagaactgtagtataagagaatgtcattgtactttatacccctatcctctaagggcatggaaaaaaactggagtctgacttttctctctgctggggtggaaaagcttaacagtatctgagcgaaggctgggctgtaggagccattcttatacccttcctttcagtgtgtcagatactgggattcccagagcttgactttatctatcaacaggcacagactgttagttcccagcagtattcaaggagcacagatggtgggggtgggcatgaggctggaaccagcgccatgacaggtggggctcgtggcagaagctatggggttatgtggggtaagatggtgatgggcagagaggtgggacacgaactagaaagtagcacactttggtagtacctaccctaaatgtgcttcctcattagagggcttagaacaaacacactcgctgctaggttgcggctctatgggaagcagcaagaaaatgtctgatctagtttaaagccttggaggtgggctgccctatgttcttcctttggatgcattaaatattgagacctcctaccttacaaagccagcaagaactcactgcacaactggactcgattttccagtggatctgtaatgagcaccagactttcaaacagtccttgtggagtacttaaggtgggggaatgaacgacagggcatggtgcgtggtggtgcacaggtctggggggccagaaagtgaggtggtgtgctggagttggggcagttcgacgttagaagagactgtcacacctttgtggcagcaggctaaaggctcatggctgctctctgagggatgatactagagaacagcgagtggcattgttctttcttcaactaccctagaagcacaagaaatggctgtgctctagagaatgttttcttgacacaaagtctcagtatgtagttctgctggacccaaattcgttatatatatcagattgtccccaactcacagagatccactagcctgcttctggcctcccctagtactgtcattaaaggagtgcactaccacactgtcctttggttgctattttgtgcagccatttctgtgcttttccttatattgggccaggtagtggactgccttatttataaagatagaagacctcactttggagcacgactctctttttcagagaccctgtacagtcctcatttagatttcccagcagtaattatggagcccagaagataggcttagggtcatctgggagaggagtaggggaggttagtatgggggaggttgggagtctaggaagagagaaaatctgatctttgtagtatcataatgttccatccacattggaacacttagaaaatactggctcctagattctctatcatctaggatggatacacaaaacaaatatctgtgatctagttaatgttagggaggagagggactggatcttcgttgggtccggtactagcttggctatcctcccaaacctacaacacagaccactcttctccaagtgtggcgacggtggtggggaggagcacgtcaagtgtgtgtgaaggggccaggtggggggtataggactagagaatgtcaagcctctaaagtatccgaagactcacattggtcggaggaccctgaaaacactgatgtacactctccctcacctagattggaaaagctaagaaaacaggactttttggtcattgttgttggggtgtggagatttgcatctatagtccttcttccactagatcaagtactgggcatctcttctttataaagatcttaaaaccttattggggatattgattgtcttcctaaaacaaacagaactaaaccaaacagaatgaagccaaggcacctaagctaaccttgacttaccttaccatttgattttgaagtagtgcttgagaaacacgaagtgggactagggtgcagtagagggagataggagggtggagctgggggagggggagggtagcacaggggttctagtggggtaagaatagaaaaagtcacatctctgtcacatcctgaaggttcgttgtggttggagagcctagaaaatactggtgtctaagttctctttcagttaggttggaactgtgaagaaaatgtctgggacccagttaatattgaggggttgaattgtccctatgttctcccaatcactgggttttataacagacttctttatgccttctacgggtgccaagacctcacttctgaccctggctttcctttccagggacaggcccagaccgttagatttcctagcactactcatgcagcatataaggtgggctgtgaattgggctggaggtggggatgtggatcaagagggtgcaggtagggatgtatgatgagagaatgacagccttctgtagtaccctaaaggcccagtgaatattctgtcacatcaccactgaaaattgaaaactatgctggtgcctagtctccccccagctaggatgaaaagctaagaaaatgtctgtgatctagttcatggctgtctgtatatgcatacatatacgttggtggggagagatctacctgttccttgctcttcctttcactgggctatggaggtgacccatagtgcctccagttctggtattggtcttcttaagttgaaacagttaccgagatcttactgaagaggttggctcttcctcccaactgactgtacagacctttagatctcccagttgtacttgccaagcccagaaggtttgtccccttggccttctggtatacagaatttgctctttctgacagttaaaaagcaagcaagcaagcatactgagctcgcttacattaacggcttgctccccacaggcatttctttcttttttggggagagggggtgtttccagacagggtttctctgtattagccctggctgtcctggaactcactttgtagaccaggctgtcctggaactcagaaacctgcctgcctctgcctcctgagtgctgggattaaaagtgtgcgccaccatgtccggcccccacaggcatttctgcagtctgttcctaggcagccatttctgcagtccttctgggttctagtttgctttctattgataagcggcttaagaataattttagggtttctagtgtgataaaacagtatgggtggggctggagagattgctcagtggttaagagcactgactgctcttcggaaggtcctgagttcaaatcccagcaaccacatggtggctcaaaaccatctgtaatgagatctgatgccctcttctggagtgtctaaagacagctacagtgtacttacatataataatagtagtaataatgataataggagttaaaaaaaacagtatgggtaacagtgacttgggggagaaatttcatttcagcttacaattctcaagttactctcagggagggaagtcagagtaagactcaaggcaaaaatctggaggcaggaactgaagcagaagccttggaggttgcttactggttgactcccttggtttgctcagcctgctttctgatggaacccaggagcacctggccagggagtcaaggcctactataggatgggccatcttatagcaaaatgggggtggggagtcctacagacttgcctacaggcaatctaatggaggaatttggtcaggtgaggatggctttagcctgttttttttttttttttttttttttttttttggttttttggtttttcgagacagggtttctctgtatagccctggctgtcctggaactcactctgtagaccaggctggcctcgaactcagaaattcacctgcctctgcctcccgagtgctgggattaaaggcatgcgccaccacgcccggctggctttagcctgttaagttaaaaactaaaacacaggagataagggtttttatttcatccctctaagtactttcaaacttccctctgaaacctcacaaaccaggccttcatcgcctgcatttctctcagcctccctacctcccaaggtcttaatggagtggtccattaagcagtgaccactcaacagcttttctagcccaacattccacactctatcacaaccctttccaaaatgcgggcaactctgtcacagcaacgaccatactggtacaagtttctattctagtttgctttctcttgctgtggtaaaatactgaccaaaaccaacttggggaggaaagggtttcttttaccttactgggtatagtccatcatgaagggcagccagggcagaatcttaaggctggagggagcctggatgcaggaagtaaagcagagaccacagagaaatgctgcttactggcttgcctaacttgcttttttgtacaatccagaaccccttgcccagaggtgatatagctcaggggacctcctacctgtcctagaggagcaagcaccatccacaatgaactaggtcctcccacatcaattattaaataagaaaatgccccagagattggcctacaggccaatctgatgggggaattttctcaaccgaggttcccttttcttagatgaccctgctgtgtgtcgggttggctagaaactgcccagtacatgccctccctttagtctttcttgagagctgagtgccttgccccaacatggcctctcactgctgctgctcctcaggaagaaagcttcctgcccccatttccctttagtctcttgttttttatgtttctgtctttgttgaaacagggtttcactatgtagcccttgctggtcaggaacctgctatgtagattaggctggcttcagactcaaagagatccacttcctgcttctgcctcctaaatgcatggattaaagatgtgcaccactatacctggccaaggttcttgtggggaaacacaatgggcacttaccttaatccaggacagtggcaggtgtgaagtggattacggtaccattactgtcttggggtcttgattgtgttcattctccaccaattaaagaattaaaaggcaggaagaagaactcaggcacactagacaacaatatttaacacactttattaaatatatgtgaagaagggcaccatacacacactcacacacacatatgagagagacagacagaggaggtggtggtggagggaggcacacatgaagaaaagaatccctgcagggccgagaagggatttggaaagccaaattcagtttttaaaatctggggctgggaagccgggtgtggtggcacacgcctttgatcccagcacttgggagacagaggcaggcggatttctgagttcgaggcctatttttttgccatctttattactgatctatgtggcctctttgcctatctatctgcctgtcagggaactacccaatttttagtccctaagcactgaccaagccttttagagcccaaagaccacacaacaattgagtttcaaatgcaaaacctttgcctacaggatttagatctatactgctagattttggtttggtttgattgttttgttttgtttctttttttttttttaagatttatttattatatgtaagtacactgtagctgttttcagacacaccagaagagggcaccagatctcattgcggatggttgtgaaccaccatgtggttgctgggatttgaactcaggaccttcggaagagcagtcagtgttcttaactgctgagccatctttccagcccttgttttcttaaaatttatttgttttatgcatattggtgttctgtctgcatgtaagtctatgtgagggtgtcagatcccctggaactggaattacagacagttgtgagctgctacgtgggttctgggaattgaacccaggtcctttggaagaacagccagtgttcttgaccactgagcagtctctctagcccctttgctttcttttttttttttctttttctttcctttttgttttttaaagacagggtttctctgtgtagtactagctgtcctgaaactcgctttatagacctggctggccttgaattcatagatcctcctgcctctgcctcctgagtggtagtgtagattggtttcctatctggaatgagtagaagcttgttcatatctctccaggaatagtgcacacaacacaatctagtttttaaaatatatataaatcctggctgtttaaaatgcctgttttcaccagttgtgatggcacataccttcaatctctacactcaggaggcagaggcagggggatttccatgagttgaaggacagttttgtctacagtgggagttgcaggccagccagggatacagagtgaggccctgtcttggaaaataaaataaatgaataaatttaattaaaaaaatagatgcctaatttcctcatctgttgcctttattttgttaggctagacagtattcttgattattttggttttaggcatattatttttatcatatatctcatgttaagtgcagagaattaaaaagcagtcacactgggatcttaatggctagcagagtttgacattatccagaaacattaacattaaccttccttaatggctttctcaactagtcctctctctcccaaagtttaccttcctcacatctcagcctcatatatgagtcttttttttttttttttttttttcgagacagggtatctctgtatagccctggctgtcctggaactcactttgtagaccaggttgcctcgaactcagaaatctgcctgcctctgcctcctgagtgctgggattaaaggcgtgcaccaccattgcccggctatgagagtctttataacaatgatatattaatatttgccccacacatgcacaacatgtgatgctagacctataggaggaactatgaatggaagttactagaaactgcaccttccatagaaacttcttcaaggctgattaactgattagaatttcaaagattatggagaagttggaatactgttggtccatagcttaatttagttatcttaaactctatttagcctccttaaaaaagcttttctttagaaatcagattcattcattttattttatgtggtttttttgttgtttgtttgtttttgtttttttcttgagacagggtctctctgtgtagccctggctgtcctggaactcacttcgtagaccaggctggcctcgaactcagaaattcgcctgcctctgcctcccaagtgctgggattaaaggtgtgcgccaccacgcctggctattttatgtgttttgccttcatttatgtctgtgtaccatatgattgcttggtgcttgaggaggtcataagaaaacatcagatcccctggaactggctatgagccacctggtgggtgatgggaatggaaccgggctcctctgaaagtcagggctcttaaatactaagccagctcttcagcctgatattagcttccttaatagttatttcttacccatctcagttcctgatccattatcctgtgactatcagagaaaaaccatttggaatgtattaatttaacaaatcctcaatttccatgacccaaaacattaaataacatttgagacttatagctgagatttttccacttgcctgtaacctgttatctccataatgtgtttaaaaagtgtgttggtttgtgactttcttcttcctgagctgcaatcacttctacttggcttcagaataagctctgtcttaccctctttgaggtaagagtggtatttttgtgtcaacaattataacagcacaaatagacggacacaaatgggctaagggattctgatactacttcattcactacagatattgttattctaggtttgaactctgcccctttctaggcatcacttagttttcttacctagcacatcagggtattggggaaaaaaaatcagttaacctgtacaccagaattacctggccaaggtaggaaagcggggagggctaaaaacagatgcccgattactacatcatagagattctgtttggggataggtcctaaataccaaagtttattactttccccaactagatctcacaagttcaactgtatgggagtctatcagttggccctttggtgaaggcagttttaaagataaacaagtcattttcatgaagattgacaaaagaagctttggggacagattagagactaaaagaaatggtggaagtggctagggtatagcttagttggtagagtgcttgctcatttcagcccactcttacatttcataacctgggaaactaagcttacataaatcaactttgccaatactgactttgatagaatacaactgtagcaattccaactagagtggaggtaggaggatcagaattccagctatatagtgagttcaaggccagcctgggatctatgagacttgggaccagggtggaagacagccagagtccacaggcctaccctttggggactggggtaaacactactacagtgagcaagtatgtggtgaaaagatggcagagaaggagaagcagagcagtttgtgttctatgaagagaggtagaactatgaggaacagcctgatgtgagaggcttgcacagccaccatgatgatgtttgggactgtgctgccgccaaaggccatgtatgcttctgtggccctatagcagcaggcatcagtgtcaatgaccatggcccatgttaccactaaaggccacatgggagtgcacggtctcacacgccatcagaggaaatgttgctgtttgagggcagtacccagccgccgcctcgccccgccccaccccccttgcacgctgaggcacctgggagagctggccccgccccagtgtggggcagtgcaggagggctggccccgccccttgcctggccttaattgcgtgagcgggaaagctggcccctccccttgctcgctgaggaacctgggagagctggccccacccttgctcattgaggcactttggagaaggaggccccgccccttgccatggccatgagggctagtgggctgaccaactcagctaccactcaggcccagatccaaggctttaggttagcccaccccaacacataacctatctatgatctgctgaagtgcgtgcagggggtctgtctgcagaaccaaaactgcagagtctttgtgacacagggcaacagtaggatatcctagagaagtctctgtgagggtctggttttgatgatgtagcagaagtcagaggcctcgaaccagaccaatgactcattgcaataaacatttgcaagttaacatgtgtggagaagggttggagagatggctcagcggttaagagcactgactactcttccataggtcatgatttcaaatcccagcaaccacatggctcacaaccatctgtaatgagatctgatgccctcttcaggggtgtctgaagacagctacagtgtatttatatataaataaataaatcttaagaaaaaaaagatgtgtggacaaaagggtatagtgtgagacacactgtgacacactgcagattccacagcaaggtttttttttttttttaattttaaaaatatttttagggggctggagagatggctcagtggttaagagcacttgactgttcttatgaaggtcctgagttcaaatacacatggtgacttacaaccatctataatgggatctcacaccctctactggtgtgtctaaagacagctatagtgtacttagatataaataataaataaatctttaaaaatacttttagtttttttggggggaggggaggttgctagagtggagggttgatatgcagggatggtaagattagtgggattggagtgcaggatgtgaaattcacaaagaatcaaaaatggaaaaagcaggaagagggaggataaataacagggtatttttttttctttttactggttctccattttacttcctgttattcatcaagtggctcacaactttctttaccttcacaaaagctcccaatttgcaattcactttctatgtatcaccttctcccccacctccccctttgagatgagagtccaactcttgctgttctggaacgtgctgcgtataccaggctacccggaaactcacagagatttgagtttatgcctacttagtgctgggattaaagtcctgtatcatcatacccccttttaaaaaaagaaacatgtattctacttcgtatctttgtggtttagcaaccttgtataatgctagatctcaaaggcttgaaaatcaagagtagaccaggctagagataagcagcagtcagctcacctaatgatacaacatgcattttgtcatttctcatctcgggccttttgctgatcctttgcagtcctttcaagatccaggttctgtattaggaactgaaacatacccaagatctctttctactcattggtaagtcagctttgaatacacatgctatagtttcccaatttcttcttttccccgtgggggggggggtctcttgcttctatgtatttctttggctggaaaatgatagcaaatcgagtgttaccttactggatctcaatttcagtcgtgtcaatattagagcccaaaaagtctgaaacaagacagatttctttgcaaagacgttggacaagtggacacaggcaaagaagagcacagcagctaactgatcagttcaaggcccgttgataggtatttaaagtattagtggtagcaggaagaggggctctgaatcccctaactaaggaggtattgacagtggatagcagctgttggcagagggaaattcaactttaagagtgtggcccttggtagttgcagtgaacgggcaggcccacacccaggtaaatttggacagcacaaactggacttgtggtttgtctgtctgtctatctatctatctatctatctatctatctatctatctatctatctatctattaaaaagaggactcaatgttgagaaggaatgaagtggttagggattggtctgggaggagttgatagaggagtagggagtagtatgagcaaaaaacactatataaaattttcaaataattgatgaaagcatattaaaagattagtggtcatttactttatactaaaagattagtggtcctttaatttgtttttagcattggataagtgatttacctaagcttcagtctggctggagagatggcttagtgcttaagaacccttgccactcttccaaaggactggagttgtgctcccagtacccatgttgaacagctcacaactacctgaaactctagctctagagggtcgatgtcctcttctgacctctgtgggcattggactcttgcgaacatgttcatatgcacacacacaaacactcataaataaaaaataaatcttaaaaaaaattagtgggggctggtgagatggctcagtgggtaagagcacccgactgctcttccgaaggtccagagttcaaatcccagcaaccacatggtggctcacaaccatccgtaacaagatctgactccctcttctggtgtgtctgaagacagctacagtgtacttacatataataaataaataaatctaaaaaaaaaaattagtggacatttagttttttttccccattggacaagttggtttacccaagccttagcaaccctggttctaaattttaccccagctcaaatgctctaagtactgtgctaagcacgtggctactttgtgactgtcagagctttggagtccagaaagtggggaggatagagagtggacagcttagagaatgaagtaagctttaagacaaagcagttaggaagctcattttccctctcaagaaggagttccttatcttcaagttagacatcagtaagcctactttactgaaaaagctcaagcttttggacagtgagaatttttgagagaaaccagaaagctgcggaaatgttaaaagccctataggtatgtaaaatgtgattgggctgaggtctaaggaactgaaaggcaaggggctgcgggcagtggtgacgcacgcctttaatcccagcacaggcaggcggatttctgagtttgaggccagcctggtctacagagtgagttccaggacagccagggctacacagagaaaccctgtcttgaaaaaaaaaaaaaacccataacaaaacaaaccaaaccaaaccaaccaaacaaacaaaaaacaaatgcatttcctcagtacgttgtgtacctacctcttaaaaattataaataaaatatcttggcagggtagcttttgtgaatacaaggactcttgtcacatgccatatctgggagccctgctcctgtttgatttgagaagtctaaatttaacctattcttttttttttttttttttttggtttttggagacggggtttctctgtgtagccctggctgtcctggcactcactttgtagaccaggctggcctcgaactcagaaatccgcctgcctctgcctccagagtgctgggattaaaggcgtgcgccaccacgcctggcttaacctattcttaatccaactgctgacatcatagcttgattaaaacctactatgctatcttaagtgctatgataatacagacaggaatttaaaacatgatttttttttcttctcatgataccataatattttagttgtggtggtaaaagaggagtgctttctcctttctgaataaaaagttgagatttgtggactgacaaatgtaccttttctggagacacttgaatagcatccccaacgtgtactataatttttaaaaaatctggataataggaaacacatttgcagaaatagcatatactgtacacaagtgctaactaggtaacaaacgaggggacaatgttactagatctttttttttaagatttatttattatatgtaagtacactgtagctgtcttcaggcactccagaagagggcatcagatttcgttacagatggttgtgagccaccatgtggttgctgggatttgaactcagaacctttgaaagagcagtcggtgctcttaatcgctgagccatttaacatggggaaccagcccaggagaaagcagtttgttgcagtcaacaaagctgaaaaaggagtggagatctgaagactgctttgacatcagccatggagatgcagagtttggagtttgcccagctggtttcctgccttgctttggggatcacagttaattaagttgaatgaatctcagaagagaccttgaactttggactttttaacattgttgcaactgctatagactatgaggactttgaaagttggactaaatacattttgcattatgctatgtttaaatatggccccatgttactagatatttctacttacaagggccacaccaattcatggacgcaagactgccagatcctcttagagaacattctactaaggacacaaatacttcatttttcaacctagttcctgagttcccagagcatcctctctatgttcatagagctctatctgcctgcacagatttgcacaccatgtgactaagatgcagggtatcatcaaggggaagcaagaagacctttctgattccattaatggtgggtgcttcaggttaacgcatgagctttgcatctagggcacttaaagaactggtaaagatgcacaatgttgccttacaatgttaaataatgtgagcttaaaaatggagacctgggaagaccattaaaaaatagtgaaactgttcacttgacagtgtagaagtggaaattcacactgcctaatacctcacagttagtaaacagaaaaacaaggcatttggatacaggataaattttgggttgaaagttttgtggatgggttatcctgtatccaaatgcaggtacaggggatggagaagagactgaggaaatgaccaatgaatatcagcccaacttgagacccatccctgacactattaatactctgttatgcttgcagacaggaagctagcatgattgtcctctgagaggctccacccagaagctgagtcaaatgaatgtagacactcacagctaaacagtggatggagcttggggactcttatggaagaataggaggaggaactgtgggtcccagaggggataggaactccattgatagaccaacagagtcaactaacctggacccaaaccatacacaggctggacctaggcctccttttcatatgtagcagatgtgcacctcagttgtcatgtgggtcctgaacaactggggcaggagctatcccaaaagctgttgcctgtctgtgggatatgttcttttagctgggctgccttgtcaggcctcagtgggagaggaagcacctagtgtcacagagacttgatatgcccagggaagtggaaggagatacccaggaggggccccaccctctcagaggagaaggggagagggagatgggggaagaattgtgggagggggttaccaggaagggggctgtgagtgggatgtaaagtgagtaaaaaaaatgtataacatgaataaaagagcttgctttaattaatttggctctgatgatctgagtcggtggcctttctcctcccacatttgggattaacagtaagattaaataaacccttaaatcaatcccagttttggtctgattccttctttcccggttttccctttttgcaacaggaatgctttgtgtcattgtgctttggcagtatgtaacttgtttttgatgttttaactgcttaggtagagctgtgtttttaggaggctttggactggac

SEQ ID NO: 4 - DNA, 19450 bp, Mus musculus
ccggaccggaccgtggttgtggttcaattcccagcacccacatggcagctcacaactgtctgtaagtccagttccagggtatctgacaccctcatacagacttacattcaggcaaaacaccaatgcactaaataaatacatacatacacaccgaacaacaaaagactacaggtctgaaaaaagccagtaggcattgcaagcctggaggtggtggaccatggatcagaattcaaggctgggctgggctacatgagagcctttaaaagtaagtaaataaacaaggccttattctctattcccactagggaaatgaagcaaactataattggatatccctcgcatctacctacttggaatagctatctagaacctaggaaccagctggtgttggaggcaagggcctgtaaccgcggcacttgggagatttagagcaagaagatgaagaattgggtctatcctgggcaatgtcatgagactctgtctcaaaaaaaaaaagaaagaaagaggagagagagagagagagagagagagagagagagagagaggaagaagaagaggaggaggaggaggaggaggggggaggggaggaggggaggggagaggagaggaggggagaggagaagaaaaagaaaggaaggaaggaaagaaagaaggacaggagagctggaaagatggctcagtggttaccaagaacatttgctactcttctggagcccctgaatttgttttttgtttttttaaaggtttatttattttatttatattagtacactgttgctgtcttcagatataccagaagagggcaccagatcccattacagacggttgtaagccaccatgtggttgctgggaattgaactcaggacctttagaagtacagtcagtgctcttaactactgagccgtctctccagctcctgaatttgttttttgtttgtttgcttgtttgtacgttttgagacagggtcttgtagcccaggctggtctcaaattctctttgtagataggatgaccttgaatttctgacacttctgccttgacctcagtgctgtgactacaagcacacccctcacctggtttatgcaggttccggatggaacacagggcttcaggaatggcagagaagcaagttacctgactcttgctcagccattttgaggctataggaggagggggacaccaggcagtgagtccccatgtcaaaaaataagtcgagccaggcagagagggacgtgcttttaatcccagcacttggcaagcagaggcaggtcgatcactgtgagtttgagaccagcctgggctatactatatagtgagccagccagggctaccctggaaaactctatctcaagaacaaatcaatactgtactctcctcgaccttggccagagaagtttcttctgcaaggaggagcagctaatgcagactcagagctggcctgagactgagcaacaattgcatgcttagctccaaacaaggtgtctatagcaacccacacactgcccaaggcccatggaacatcgtggaagcagggctggaaagaacatgagagctaaagatggggaggcaagctgtgaaaatgctggctgccgccctcacaagcgtactgcggctgtggctacctgcatacgattccgacaagattagccaacattccagcaagcactgctaactggactcacagggttgttattattattatattattattattattttaaaaggagacctcattaaggttataggaagacagcttcgggatgtgtagggagtgggggagaagtacgagtgaatgcatgtatgaaattgccaaggaataaataaatattaaatatagggaaaacccaacacttggaaggtggaggcaggaagggcaaggtcagcgttggctacggagcaaactcaaagccagctgtactgcatgagactgcgtctcaaaagaacaaaggtggaagaagagctcagcagttagcagcacatgttgctcttgctgagaggacctgagtttgctagcaagcacctaagtcaggtagctcacaagcctctgtcactccatctccagggggccaatgcctcagacacacatatttaaaaacaattgtgagcagggtgtggtgccgcatgcgcatgcctttaatcccagcactcaggaggcagaggcaggcggatttctgagttcaagtccagcctgatctacagagtgagttccaggacagccaggactacacagagaaaccctgtcttgaaaaaccaaaaaaacaaaacaaaacaaaaaaacaattgtgtgtgtgtgtgtgtgtgtgtgtgtgtgtgtgtgtatgtgtgtgtgtgtgaaacaaaacgaaacaaaacaaaacaaaacaaccctactttcatatttttaccactggtagtaaaatccaacactaaaaggaattcctggcataagaaatcttgaggatgaaaagtcaatttaagggtatgtttgaacatagcactctgataaagacaccatccacccatttgtctaaagtgagttagtcttcccaatcaaatcctcacttatgccaatgcctgccttaaatgttttctatgtgtagtctcctcaattaccatcaacattcaaaccatcactttcccctataattccatttaccttggactttcacttccagccttattctaatttcttgggctttcatgtttattcgtcaactttcattttcattatacaaggacctgataagtttttattgataaaagttttattatttgctatgaattgaatgcggctatgccctcatgtgtgtgtgtgtttaaatagtaagctcagatgtttacttaaaaacaaaacaaaacaaaacaaaacaaaaacatgtgttttctagccaagttggtcaggaactgactgtgtagcccaagctagtcttgaactagctgcaatccctttctgcctctgcctttaaagtgctaacaagtgtgagccacctgcccagctataactactattttttaatgtgagcactttctgttctcacagaggacctggtttgatttccaacacccacattgtggctcataaccatctataactccagttccagggatcctagcaaaccctcttctgacattggtgcccaacaggcatacacatgattcacaaacatgcaaacaagcagaacactcatacacgtaaaatctaaaataataataaagtagacctatagagtatatataattccaaatggatttcagtagaagaccctacttacattgcacagaaaaagctgtctggctgcttcaggcatgccaatatcagcacatgtaaacaagcttccaactttgtttttgagtaatcaactcattattcaccagatctgaggctatttctattcaacagcacaagaaaagaagggagaagcaggaggatctctgtgagtttgaggccagcctggtctacagagctagttccaagacaccagggctgttacatagagaaatgctgtctcaaaaatgaacacacacacacacacacacacacacacacacacacacacaagcgcaagaaagaaaccattcgaatttgactgcatatgtacataaaacctttaaataaaagacgtaatttcaaatcaaatgaggtcttaagaatggagcctaaacctgtctgtctctttaccagacgcagggcagccagaaggcagccattcacaatccaggaagacaggaagggataacaccagaacccaacctccattttagagaggtctagcctcttgagctatgacacactatttgttctctaactacccaaagttgtattttactatgctaattagctgattaagacattaggtaaaggtgttctacaaagaaactgtaaataaaagacatactctgtgccttagcctatctcatgattccttttctggatgtcttcataaccaccttaacctctacgaagatacagagacacaggtagcactacagtgctgtatttgtttaagcccccaacaaacttggtggcttaaagcaacacagatctataaccttataattttagaagtcagaagttcagtgtgagacacctagttgaaattgaaattattatttgaaattaaattgaaattattccttctgtaagttttagagaattcatttccctgccctttttagcttcaaatttcttagctagtaattgccttcctctatgtctatagccggatgtagagtctttgtcaatcttttatccctgccatttcaatgaaacaacaccttaccttctaggggaatctttttatctcaaggtcgattgattagaaacctcagtttcttcctccaatgtaatatagtatattagtatattctggggagtcagtgtttgtctgcctactaacacaggtaagaatttgcataggtattacaaaatcagtactttgcaaatctttcttctcttccgaattgaaaactgaacattaatccaaacatggcggcagaagcctttaaaatcggcactgtcccactgaaggcagtggcaggcagagctttgcgagtttgaggttatttactgagaccttgtctcagaaataaggcattaaaaaaaaaacaaaaaacaaaattcaccccaaatccgcatcaaaaccaaagctgattgttaatttccctcctttctaaactggattcattccttagtgccattgtttgctcgtctgaacacactgaataaacactaccgggagggattttccgtgcctatagtaaataagaatatgatttttcagatacgaaccactgagaattgttttgccttgcccgccacccccaccccgaaaatactccttgtcccagatagtagaaacttaatgggttttcaaagcactcagattattttcgaatttcaacgataccagagatcgggtcattatgtacctcggaaataaacggaacgcagtaccaaaattttaggtctcaacttccaaggcttctcaaagaaagttatcgcagacttagttactcgttcttggttacttcacacgctaccagtaatttttccacttttctgaatctgtgccccccccccacattctttcatcaactttaatccaaacgcgtacaatcagaaaaccccactaaagcggaggtagaatcccattggtttttagcataatcacatggcgggaaaattgttaccaaaaaaaaaaaaaaagagcaaaaatcttacctgaaaaagacacgtgcggtgaggtagtattgctgaatttggcttgagcaatattaaaatattaagactattccaaagagtttttcggacacgaggctttccctgatgtgagtgtgtggattctagaccctgctacaagtcacgcccttaactttcttttccgctctagactgcagtttattacccacgccaggcttattgaacgctttgcatatctacctgtaacattttagccaaccatctctacgctatcccagacattttcatcacctctgctctgcccagcagacattttagtcgacctctaggggttggttataaggcagggattttagcgatctccccaggtccctggcggcggcaggcattttagtgatagcccaggtccccggtggcaggcattttagcgatagcccaggtccccggtggcaggcattttagcgatcttccagatccccagtggcagacattttagtgatagcccaggtccccggtggcaggcattttagtgatagcccaggtccccggtggcaggcattttagcgatcttccagatccccagtggcagacattttagtgatagcccaggtccccggtggcaggcattttagtgatagcccaggtccccggtggcaggcattttagcgatcttccagatccccagtggcagacattttagtgatagcccagatccccggtggcaggcattttagtgacctcccagatccctggtggcaggcattttagtgatagcccaagtcccccgtggcagacattttagtgacctcccagtaagcggtggcaggcattttagcgacctcccagatccccggtggcaggcattttagtgatagcccagatcctcgacggcaggcattttagtgacctcccagatccccggtggcaggcattttagtgacctaccaggtccccggtggcaggcattttagtgatagcccaagtcccccgtggcagacattttagtgacctcccagtaagcggtggcaggcattttagcgacctcccagatccccggtggcaggcattttagtgatagcccagatcctcgacggcaggcattttagtgacctcccagatccccggtggcaggcattttagtgacctaccaggtccccggtggcaggcattttagtgacctcccaggtccccggtggcaggcattttagtgatagcccagatacccggtggcaggcattttagtgatagcccaagtaccccgtggcagacattttagtgacctcccagtacccggtggcaggcattttagtgatagcccaggtccccggtggtaggcattttagtaaagtctcccagtcccaggcatccatttgagccattagtccgggaacgtggcatgtatgttagctatctttccaggtccctgaccggtagtctaaccacctgtaagggacagacattttaaattttggctccaggacccagcagacattttagttattcctccgttatgcggcaggcattttaactatcggttcgggactacgcaggcattttaccttcatctccgcatagctggcaagcattttaggaatctttctgctgcttggcaatcactttaaccatctcttccgctgtcccgcaagcacgtagccatcgctccactgtcctgaaagcactttgccactgtcccactgtcccgcaagcacttagccacctctcccctgtcccgcaagcacttagccatcgccccactgtcctgcaagcacttagccatcgccccactatcccgcaagaatttcagccacctctccaccaccccaacaaggacttcgggcacctctccaccgtcccgcaggcactttaggcatctgccctctccttagcccgcatctcacccaccgctccgctctggccacctgtctagctggctatcacgctcttcttccatcacgcgcttgccgcagccgcctcccgggagtggatgcaggactcaagatgcgtggatatctcggaaagtgagaacagagcaagggcgccgagcgcaagtgtgtagcgcttgcaggtacttttgggaccgagtggagcacgacgtagcgcctcaccggatcttgcgagattgcgcctgacacaagcgctgcactgagggtttgagggagtgtggggcgggacctaaggctcttgaggcgcgggatcctgctgagagggtgtggttagcacacttgaccacctgcgcagagaagagggggcagagcttaggggaacagagcatggaccttgtgggagtcacagaaaagaatggctgcaacctgagcccatttgcctttgagagctgggaaagctaggccagcaggtagcagcttgcctggtcgaatggcccttggtgagtgttggaatgctggaaacccagagaccaaagctgccaggctcagctccaacacagtctcatttgtttggtttgtggcagactgcctgcaccccaaccctttcctccccagtcttgcctcctcctgccccctctcttaaactcttacggtctcaaagactgggtttgagggaaacctactgtaatggattgatatacttctccttcaattgacaagagacttaatgtcctagagaaaaattttccttaaactgtacatatccaaatttcaaaaaatgtataacagtcagtatcaatgcaaactgagcaatctgcctaggtacctataaacacacaagatacctataaacacacaagatacctataaacacacaagatacctataaacacacctagatacctataagcacacaagaagcttatagagcaccaattagactggaacagaaaagaaaatcctcctgccacataataacccaattttcttttcaaagaattttttaaaaatatttttattttatgtgtgtgggtgtgtgcagagcccatagaggccggatgagagcatcagatctccctgcagctggaggtacaggcgtctgtgagctggtactcgagtgtttgggaatcgaacctgggtcctctgcaaatgcagccactgctcttagccactgtaccatcattttaaccccaatgtcaattttcagtccccaaagctttgctggtatgtgatacaaattttataaaagtagaaaatgaggagaacttctttgcaaagaaataggatgtagcccaagggaggaaacaaaaaaccctctgagtgaaaaaggcagattcttcaagtaaaatgaatacaaaaatccccaagaatgtgatattttggcaaaagccctctataccatccaggtctgaaatattaaaagaattagagcctttcaccaggtggtggcggcgcacgcctttaatcccagcactcaggaggcagaggcaggcagatttctgagttcgaggccggcctggtctacaaagcgagttccaggacagccagggctatatagagaaaccctgtctcgaaaaacaaaaacaaaaacaaaccaaaaaaaccaacaaaacaaaacaaacaaacaaaaaagaattctagcatctttcacatacaaaagaaagtaccgaggaaaagctggaatggagctctttcatgttcttccttgagttctttgaactgaaacaaatgatggaaaatggcttctccccagaagccatcaattctcagtagaaattcaagaagcccattcatgaaaattcatggaaggccacaggaagctgcacccaagctaatcacctacctttgccaagtatactgaaatagctccatgttcttagtatgtctactgttccgtgtgcttggcacaggtctgtaattgcagcacttgggtgtatgtggtagagagagacgtttcaggtgttcagggttatcctctttggcgatatagtgagtttgaggccaggctaggatgcatgagaccctttaattcctgcacttgggaggcagaggcaggaggatctctgactttgagaccagtctgatgtacagaacaagttctaggacagtcagggctacatagagacaacaatctgtctcgaaaacaaccataaaacaattgtgtgtgtaaaattattaaattattgagctttctaggaatttaaagctttaacagtgagatactttgcttttaaatatcaatgcccaattcattcatatttcttcaaatgaacgaaaatgaccagtatgcatatgttgttactggaatgcattctttttttacctttagaagatagaaagtaatactccaaaatatttaataaaatattttaaagatggatgctactagtgattagtattataagtagttgttaactgataacattgattacctaacaaaagttgactgtgagaagatagcatttctaggatgtacaggagaaaacatactgatttctagaaactatcaccaaattttaaaaataatatttttattaattctttgagaatttggcatgtgtactatatcacccccattcctttctctaaccccttgcagatccaccacctgccaccctctctcaacttaatctcctcattaaaaaaaaattacccacagtgtccaatttgtgctgcacgtgaatgcctggatgtgaaccatccactggggtggtgtgcctaccaaggagtcaaaaaaccgtgactgtccctctcccaaaagctctcaactctaaatagtgcttccttatgcttggaatggcgattaacacaagcttattcaggcagctacagttcacaagtacagcagttaatgtcctgtcctgaaggttttgttttgctctggtccggctttgcctatacatcacaaagtctgtttcttcttctgccatggtcactggtccttggggagaggggactgcttttgaaaatgaaggtcatgaatcgacttcaggaggcccattgaacttgtgaaacgttgtgctcaatatttgccctgtatatgctttgcagagaaagttttcttgatgctgagaatcattggtgtcagagataaatccacagtctgtaaactgttgactgtagctctctccttacttagcatatgggggatgtggttattaaatgttttattgtatgcttttcctattttgttttttggagtaatttttggcaggaaaaaaagtaataaaatgaagagtttgaagttgaaaaatataaaacagcaaccaaagggaaatactcactttagaaatgagtacattcaaatatacctgagaaatcattacattaaaactatataaagtaaagccaagtggtgatgatgcacacctttaatcccagcacttgagaggcaaaggcagaagcagagaggcagagagaggcagatgcatctctgagaattcaaggccagcctggtctacaatgcaagttccaggacagccagggctgttgcattcggaaaccctgtctcaaaacaaaacaaaacaaaacgactaaccagtcaacaatagataacaacatcatgccctgtataaaatacctacaagttaatgttaaaacacaagtcaatagagtaggggaaaggcagtgtgcatgtggggagtactcatatgtccaacaaaagtaaaaatttgccagaatcaggtgtttgtttgagggaggggaatctcaggaagcttgggatatcttgttcaactcatgctcctgcctccaccattcaagtgctagcagtataagccttcttttttatttatttatttatttatttatttatttatttttattagatattttctttatatacatttcaaatgctatcccgaaagttccctataccctccctccgccctccacccctacccacccactcctgcttcttggccctggcattcccctctactggggcatataaagtttagtataagccttcaataacaaacatgttcggccccagaatccccatattcaaagctctgtaatgtagcaaaaagtccacaagatggcgatagagacaaggtgctaggttaagtagaagaggaagttcaaggccctcttttccgcagggaaagtttgtgaaatttttcctggtccttgctctagctctgtctggtggaatgtaacaacgttggaggaagcagtttcttttttcgggaaggagaaagatctagggatatcacgctcattactttctacacttatctgaacgctatctggagtcagaaatcaaatagctgagcgcatttggatagcagtgatcaaaactctggaaagagaaagtatactgcaggggaacagcgggctgctaagtaggtgtaggtagtccctgctgaataaactaaagtagccaacgacttgaaaagaaatagagagatctgcagagaatttaagaggtttaaaaggcactgtgtacacatgtgctgattttggaacttcctacaaagctgcacgaatcaaaagtacatggaggggttggagagatggctcagcagttcaaagcactgactgctcttctgaaggtcctgagttcaaatcccaacaacaacatggtgactcacaaccacttgtaatgagatcggatgccctcttctggtgtgatctgaagacagctacagtgtacttagatataataaataaataaatctttaaaaacagaagtacatggaggtggatttgaaggtcagcagctcatattgctgatggagtttacttggagtagagtggaaaatgtggacataactgtgagtctgtgttctgattgttgcctcccagaagatcaactcagggcattaatgattgatccacttacatgaacttcctcaggcagacatttaaaaattaattatagtgttgttatctaggttatgacaacatagtcaaagccagcaaaagggatgctttgaggtgacgataggggaagatagctttgaaattttgtttctacgcattctgggggaactacaaagtcatctatgtgcccattactcaagtcatattcaggagaaagggggggtggaaaaggttgaagtccttaatctgattgtaaccagcttctaggttcacaaaggcagtaaggtgaaggacaggacaacattgaaaactgcctgcttgccgggcagtggtggactttaatcccagcacttgggaggcagagacaagtggatttctgagttcgaggccagcctggtctacagagtgagttccaggacagtcagggctatacagagaagtctcatctcaaaaaaaaaaaacaaaacaaaaaaaaacaaaacaaaaacaaacaaacaaacaaacaaacagaaaactgccttctgggtattaaaagtgtgtttcaacgaacatagagcccatctggagagatagctttgtctcccttctttttgaagtttcttttttatgtgttttggtaattaccagcatgtgtaccacctgcatggctagtaatgtggaggccagatgcttgagtcagatcccctggggctggagttacagacagctgtgagctgccatgtgggtgctggaaacagaacctaagtccttcataagatcagccagtgctcttagccactgagccatctcttcagcccctttgtatcacatctttaaggaaattctgtcaagtctagaaaacagacccccatggccacacacaacaaagaatgcggattttataaaaatttacacctcaaattccaatatgcaaacacacttcaagtaaatgagcaatgggcgtgtgagaaatctttggtatgggacaagcccacacagggtgtccttgcaaggacattctataggtctcagaactgagccttcgttatgctgctggaagccatctttatctagctccgttgagtgagagtttgcttgggaacagacctggtgataattatgtaacaggcagaaactggctgaaggtgctgtagcaagtgacacaaataaacttgttcattcttggaggaggggagcagtggggtcaaaactctgagaaagaaaggacaatctatttcccaagtggcaagattataaaattcaacctgtcacagtgacaaccaaaaatgacctggtaaacaaataggaatttaagatttgtacataagaaaaatagagccttcctgctcataatgtagatgtgcagcttggccttcatgtggatcctgaactactggaacactggaacgggggctatcacaaaagctgttgcctgtccatgggatttgttctcctagctgagttgcctggtgggcctcagtaggagaggatgcacatatcctcacagaaacttgatgtgtcagggtgggaggatacccaggggccctcaccagctcagagaagaatgggagggagaaggaagaaggatcatgggagggggggacctggagttgggggcagtgagcaggatgtaaagtgaataagcaaaaaaaaaaaaaaaaaattgtctcctggagccaggcgtggtggcgcacgcctttaatcccagcacttgggaggcagaggcaggcagatttctgagttcgaggccagcctggtctacagagtgagttccaggacagccagggctaaacagagaaaccctgtctcgaaaaacaaaaaaataaaacaaaacaaaattgtctcctggaaatccagaagaccagacagaagatagtcaaccaaagaaaagacttgagtgatactgtaatctgactgtataacacagaacaatacaaaggcataacagtaggaaagcaagcttctcattgtaggctcggtcttcagggaagactgtatcctagggcaaaaaccaagtgtttcctcgggatgtgctaaacctggtgctggcccagtatcctctgcaatgatagaattctacctagactgctccatttttcagccagcctctattcagctagactccagaaaaacaagttcagtgtttggtgttttgctatttggtcactaggtggcagtataagcccaggtttgtgctacagacttaaagccataaaaaggagcttggttggtcatatttttacaaatacaaatatttgtagtaccttggatgactttagatggatgcagtcctctgcagtgatctatactatagtttatatgtaactccaattaaaggcatttcaaatcagactggattagcatggatacatttttgggctgttagctccgttctattttgtttacatatgtttcttttttcactcttagggaaactcattccaacagtcccacagcttcttgtcagaggtcctcgataaatattaaaaggttgaattgaaacacagcaagttgtaacacatcacacacatgtatacatatatacatgtatacagcaaccatatgctagctcatagcacatggtagcccgcaaccctctataatggcatctgattctctctttcattgtccatgaagacagagaacacatatagattgagtaaataaacaagtaaataaatgatctttatacacatacctctagggaaaacaatatgaatatagctctcataaattctcaaaaacaaatttaaaaataaaaaaagaacttaaccacatagaattatactagaaataaaagcaaaaagatatagggaaaattcacaaatgcatcgaaatacaatttgcctaaacatccaaagaatgaaagaagggaaattataaaatatgaagatggataaaagcatctcaaagtagcagcagaccagaagttgtagcatggagtaatagttgtaataggaaatttatacttgtaaatactgacataaaagaaacattaaaaagacagttaaaaaaaatgggtgctgtaaatctgaccaagaacccacaacttggacactcaaagacccttggggtgatagtggtggaccatccattattattttgcttatcagacacatcgtctaactcctctctaaatacagacctccaacgggagaggctggctcagtggttgagagcactggctgcttgctcttccagagcacctgaatgcaattcctagcaaccacatggtggctcaaagcacatggtggcccacaaccatctacaatgggatctaatttcctctttcattgtccatgaagacagagaacacatatacattaagtaaataaagaaacgaacaaataaatgatcttttaaatgaatacttctagacccatggattagggtagctctcagacctccccagagacacttctttgtgtagtgaccagggctttgatgtggtcaaaatggagagaatagtatctgtagagtgtgaagggtgctcagttctaaatggagcatctatatcacacagttacatgcaaacctcagagaaaatcacttaagacaggggccatctgggctgggggttaagcagcagtgacaggaccggtgctcaggagctcacagcagctgtgattccaatactaggggaggtactcgatctaccgctgaggagccattgggagttaatggtgtggccctctgatagatccatcaacctgcaatggatgaccccatctccatgcatatatggttggttggcacaaacgggacccagtgtgttattaaaaaacaaaaacaccattaaaaaaaccaccacaccaggccaaagccatcatttttagcatcacaaaaaaaattgaataaaatgaacaatttcttcgactctatcagggaaataacattccccaaattacaaagtctcttagagagagcagcgacttgctgatgagtgagaaaacagctcctgtccacagacagtgtgaacacaggaaaacaaactgacgctttcttggaaggtttgtttgaataaatttaataataagataatccaggctatatccagcgagcaatacacttttgtgacttttcttcataggagccctagagcatgttttttagtgaaaatgatctccatagggattggaacagaaagagaaaaggaagcattctgaaacacccccatagcagtctgctctcctagcttcagcctcagacaaacgtgactcattagaaattcaagtaactgagtcccttaatccccaggctgacatgcaactcctgagctcgaacattgccccaccttagctttcataagactcaaaccgacctgaagggagggaaaaaaaagcccaattctagcccaccacgcttctgcttaaccgacgggaaggaaaactgtacaagacccaagaagaatcgctgtgatgaccacagttgagtggcatagatacagctaatgaacaccctgccaccatcaaggcctcctgtaatatcagagaaatacaataacgtgtcatacaactcagaactaattcaagaagtctctagagcaaccaaagcaacaaattaggaaaaataaagacacttggaacattctccaacctgggatccctctggctgtatcaaacagtggacacatggtatagccctcattttcaaccacatcaaacactgtatgtaaagcttactaaaacaaaaaaatctcagctagaaaatacagatcagaaccaaattcaggcgtggtagacatctgcaaggattagatggtacatctaattatgattaacatggtaaaagtgctaaaacaaaacaaaacggtagactggttttgacccccggacaagggacagaagtgcttattttacatatcaatgcagacctggcttccaggttctactagcagcgttcagtccctgcctgatataccttgttcccaaccttgaactttccagttcaggggcttagctgcccttccacaagacgttctttccaatgttatctagacattttgcgccccacccttctcctctctgcacgagcgcaccccttcttcccttttctcctctcccctctccccatggcaactcctcaatccttgaagccagtgaactccccgagagcagttccccaataagcctacctttaatgcaatcggacttgaatagtctcgtttcacgggcagagaagtcattgatcggagacaacatgcatgaataggagaccaacaccatcaacacaaccgatgctcaaaatcaatagcattaagaagtgagcattcataaagatttggaagctaacacttcagagcacactccagaagaacaaatggggtgtgaggggaagggatttagttagggattttgcttgtcattggcggtgcatctctgcaatcccccaaatctggaaggctgaggaggatcagaagctcaaaggctgcctggaatgcgtggggagaatctccctctaccaataaagagacaaacaatgccagacaagcagaatgtatcaggagacaactggaaatgggataaagatacaagataatacctaaaacctaatggaatgaatgaagctaaagccgcacaaaggtgtgtgtattggggggtggggggagttacagatgcgcattcctaaggaaggaatctctgagtcaccaccacctgcaggaaaaccttggcagaaaacagaaatgacaaaggctcgagcgtaaatacaaaattttaaaatgctgtttttcttgaaaaaaaattttttttaagaagctgatgaaactaagctacaccaataacaaactcaaatcacgtttgcaaaaggagaccttacaatcagtcaatgcttaaaatctctcaagagccgaagcagaagggatgctatctaactcaattcatgatgccagagtgatcctgatatcaaagccagaaagagacacaaaagaaagttaaaaatttatagcccacatccctgatgatcatcatcattacaatatccataacccgagtttgatggaattaaaatatccaggtgggatttactcatggaatgcaagaatgattcaacatacaaaaatcaatgaacacgatatcaccacaatacaatgacgatcatcttgatagcattaaaacaaaaacaaacaaacaaacaaacaaacaaacaaaaaaacccacggggctggggagatggctcagcggttaagagcaccaactgctcttctgaaggtcgtgagttcaaatcccagcaaccacatggtggctcacaaccatccataatgagatctgatgccttcttctggtgcatctgaagacagctacagtgtacttacatataacaaataaataaattaaaaaaaaaacacttggaaaaactcagtgtactcatgattaaaaactctcggtaaaccaggaataggaggaaattgtctgagtacataagggccacattgaaaaagcccacagctaacatggtcaatggtgaaaaattgagtgctttccctttaataagatgaaggaaccaagaatgtttgctctcttagattccaatcctaatagaattgatggtcctgtgcagaacagttggggaagaaaaggaatccagggctgggactgtaccacagtctgtagaatgcttttctctagaatgcataaagccctatgtgcaatcccaatagtggtacaagcctatgaccctgatactcaggacgtagaagctagaggatcacaattcaacgttaccctgggctaaagaccctgttttactttattactttttttttttttaatatctgaattgtaactgactggagtactctgctcacaaatgccatgattatttatgtgggggacttacgaaagtctacacacacatacacacacacacacacacacatacacacacaccatacaactcaggtaattcagctgtaaagttataggatacaaaatgagtatataaaagtgaattgagggccactgagatggctgagcaattacaaacacttgcccccaagtttgaagacctgagtttttgtttgatacagccctggctggcttggaaattactatgtagaccaggctggctaccaatttatttaagatctgtctgcctctgcctttgagtcctgggattaaaggtgcaagccactacagcaaacttggtgttatagtttaaatatatggtttactcctagcaacttgtatgttgtcttggtgctgaaatgtggtggcatctttaagagggtttaattaatttctcaagagcctagctgagttcttggattttaagaagaggttgctataaaatgatcctagcatctacctgatagctcttgtgcatatattatactggacaaaatagatgtttccctaccacaactctcctatgagttaacactgcttccaaccagaaactgagaaaatcctggccagcacagtcttgaatgtctctgtttccagaattgtgacctaaatttatctttactattcatgacttaatctaggttgaggaatgttgctataacaaaaaataatctgagataattgctctgactagaacatttaatattgttaaaatactacttctgttcaaagtgatct

SEQ ID NO: 5 - DNA, 5074 bp, Mus musculus
ccggaccggaccgtggttgtggttcaattcccagcacccacatggcagctcacaactgtctgtaagtccagttccagggtatctgacaccctcatacagacttacattcaggcaaaacaccaatgcactaaataaatacatacatacacaccgaacaacaaaagactacaggtctgaaaaaagccagtaggcattgcaagcctggaggtggtggaccatggatcagaattcaaggctgggctgggctacatgagagcctttaaaagtaagtaaataaacaaggccttattctctattcccactagggaaatgaagcaaactataattggatatccctcgcatctacctacttggaatagctatctagaacctaggaaccagctggtgttggaggcaagggcctgtaaccgcggcacttgggagatttagagcaagaagatgaagaattgggtctatcctgggcaatgtcatgagactctgtctcaaaaaaaaaaagaaagaaagaggagagagagagagagagagagagagagagagagagagaggaagaagaagaggaggaggaggaggaggaggggggaggggaggaggggaggggagaggagaggaggggagaggagaagaaaaagaaaggaaggaaggaaagaaagaaggacaggagagctggaaagatggctcagtggttaccaagaacatttgctactcttctggagcccctgaatttgttttttgtttttttaaaggtttatttattttatttatattagtacactgttgctgtcttcagatataccagaagagggcaccagatcccattacagacggttgtaagccaccatgtggttgctgggaattgaactcaggacctttagaagtacagtcagtgctcttaactactgagccgtctctccagctcctgaatttgttttttgtttgtttgcttgtttgtacgttttgagacagggtcttgtagcccaggctggtctcaaattctctttgtagataggatgaccttgaatttctgacacttctgccttgacctcagtgctgtgactacaagcacacccctcacctggtttatgcaggttccggatggaacacagggcttcaggaatggcagagaagcaagttacctgactcttgctcagccattttgaggctataggaggagggggacaccaggcagtgagtccccatgtcaaaaaataagtcgagccaggcagagagggacgtgcttttaatcccagcacttggcaagcagaggcaggtcgatcactgtgagtttgagaccagcctgggctatactatatagtgagccagccagggctaccctggaaaactctatctcaagaacaaatcaatactgtactctcctcgaccttggccagagaagtttcttctgcaaggaggagcagctaatgcagactcagagctggcctgagactgagcaacaattgcatgcttagctccaaacaaggtgtctatagcaacccacacactgcccaaggcccatggaacatcgtggaagcagggctggaaagaacatgagagctaaagatggggaggcaagctgtgaaaatgctggctgccgccctcacaagcgtactgcggctgtggctacctgcatacgattccgacaagattagccaacattccagcaagcactgctaactggactcacagggttgttattattattatattattattattattttaaaaggagacctcattaaggttataggaagacagcttcgggatgtgtagggagtgggggagaagtacgagtgaatgcatgtatgaaattgccaaggaataaataaatattaaatatagggaaaacccaacacttggaaggtggaggcaggaagggcaaggtcagcgttggctacggagcaaactcaaagccagctgtactgcatgagactgcgtctcaaaagaacaaaggtggaagaagagctcagcagttagcagcacatgttgctcttgctgagaggacctgagtttgctagcaagcacctaagtcaggtagctcacaagcctctgtcactccatctccagggggccaatgcctcagacacacatatttaaaaacaattgtgagcagggtgtggtgccgcatgcgcatgcctttaatcccagcactcaggaggcagaggcaggcggatttctgagttcaagtccagcctgatctacagagtgagttccaggacagccaggactacacagagaaaccctgtcttgaaaaaccaaaaaaacaaaacaaaacaaaaaaacaattgtgtgtgtgtgtgtgtgtgtgtgtgtgtgtgtgtgtatgtgtgtgtgtgtgaaacaaaacgaaacaaaacaaaacaaaacaaccctactttcatatttttaccactggtagtaaaatccaacactaaaaggaattcctggcataagaaatcttgaggatgaaaagtcaatttaagggtatgtttgaacatagcactctgataaagacaccatccacccatttgtctaaagtgagttagtcttcccaatcaaatcctcacttatgccaatgcctgccttaaatgttttctatgtgtagtctcctcaattaccatcaacattcaaaccatcactttcccctataattccatttaccttggactttcacttccagccttattctaatttcttgggctttcatgtttattcgtcaactttcattttcattatacaaggacctgataagtttttattgataaaagttttattatttgctatgaattgaatgcggctatgccctcatgtgtgtgtgtgtttaaatagtaagctcagatgtttacttaaaaacaaaacaaaacaaaacaaaacaaaaacatgtgttttctagccaagttggtcaggaactgactgtgtagcccaagctagtcttgaactagctgcaatccctttctgcctctgcctttaaagtgctaacaagtgtgagccacctgcccagctataactactattttttaatgtgagcactttctgttctcacagaggacctggtttgatttccaacacccacattgtggctcataaccatctataactccagttccagggatcctagcaaaccctcttctgacattggtgcccaacaggcatacacatgattcacaaacatgcaaacaagcagaacactcatacacgtaaaatctaaaataataataaagtagacctatagagtatatataattccaaatggatttcagtagaagaccctacttacattgcacagaaaaagctgtctggctgcttcaggcatgccaatatcagcacatgtaaacaagcttccaactttgtttttgagtaatcaactcattattcaccagatctgaggctatttctattcaacagcacaagaaaagaagggagaagcaggaggatctctgtgagtttgaggccagcctggtctacagagctagttccaagacaccagggctgttacatagagaaatgctgtctcaaaaatgaacacacacacacacacacacacacacacacacacacacacaagcgcaagaaagaaaccattcgaatttgactgcatatgtacataaaacctttaaataaaagacgtaatttcaaatcaaatgaggtcttaagaatggagcctaaacctgtctgtctctttaccagacgcagggcagccagaaggcagccattcacaatccaggaagacaggaagggataacaccagaacccaacctccattttagagaggtctagcctcttgagctatgacacactatttgttctctaactacccaaagttgtattttactatgctaattagctgattaagacattaggtaaaggtgttctacaaagaaactgtaaataaaagacatactctgtgccttagcctatctcatgattccttttctggatgtcttcataaccaccttaacctctacgaagatacagagacacaggtagcactacagtgctgtatttgtttaagcccccaacaaacttggtggcttaaagcaacacagatctataaccttataattttagaagtcagaagttcagtgtgagacacctagttgaaattgaaattattatttgaaattaaattgaaattattccttctgtaagttttagagaattcatttccctgccctttttagcttcaaatttcttagctagtaattgccttcctctatgtctatagccggatgtagagtctttgtcaatcttttatccctgccatttcaatgaaacaacaccttaccttctaggggaatctttttatctcaaggtcgattgattagaaacctcagtttcttcctccaatgtaatatagtatattagtatattctggggagtcagtgtttgtctgcctactaacacaggtaagaatttgcataggtattacaaaatcagtactttgcaaatctttcttctcttccgaattgaaaactgaacattaatccaaacatggcggcagaagcctttaaaatcggcactgtcccactgaaggcagtggcaggcagagctttgcgagtttgaggttatttactgagaccttgtctcagaaataaggcattaaaaaaaaaacaaaaaacaaaattcaccccaaatccgcatcaaaaccaaagctgattgttaatttccctcctttctaaactggattcattccttagtgccattgtttgctcgtctgaacacactgaataaacactaccgggagggattttccgtgcctatagtaaataagaatatgatttttcagatacgaaccactgagaattgttttgccttgcccgccacccccaccccgaaaatactccttgtcccagatagtagaaacttaatgggttttcaaagcactcagattattttcgaatttcaacgataccagagatcgggtcattatgtacctcggaaataaacggaacgcagtaccaaaattttaggtctcaacttccaaggcttctcaaagaaagttatcgcagacttagttactcgttcttggttacttcacacgctaccagtaatttttccacttttctgaatctgtgccccccccccacattctttcatcaac

SEQ ID NO: 6 - DNA, 43014 bp, Mus musculus
gtgcagcgcttgtgtcaggcgcaatctcgcaagatccggtgaggcgctacgtcgtgctccactcggtcccaaaagtacctgcaagcgctacacacttgcgctcggcgcccttgctctgttctcactttccgagatatccacgcatcttgagtcctgcatccactcccgggaggcggctgcggcaagcgcgtgatggaagaagagcgtgatagccagctagacaggtggccagagcggagcggtgggtgagatgcgggctaaggagagggcagatgcctaaagtgctgcgggacggtggagaggtgcccgaagtccttgttggggtggtggagaggtggctgaaattcttgcgggatagtggggcgatggctaagtgcttgcaggacagtggggcgatggctaagtgcttgcgggacaggggagaggtggctaagtgcttgcgggacagtgggacagtggcaaagtgctttcaggacagtggagcgatggctacgtgcttgcgggacagcggaagagatggttaaagtgattgccaagcagcagaaagattcctaaaatgcttgccagctatgcggagatgaaggtaaaatgcctgcgtagtcccgaaccgatagttaaaatgcctgccgcataacggaggaataactaaaatgtctgctgggtcctggagccaaaatttaaaatgtctgtcccttacaggtggttagactaccggtcagggacctggaaagatagcttacatacatgccacgttcccggactaatggcttaaatggatgcctgggactgggaaactttactaaaatgcctaccaccggggacctgggctatcactaaaatgcctgccaccgggtactgggaggtcactaaaatgtctgccacggggtacttgggctatcactaaaatgcctgccaccgggtatctgggctatcactaaaatgcctgccaccggggacctgggaggtcactaaaatgcctgccaccggggacctggtaggtcactaaaatgcctgccaccggggatctgggaggtcactaaaatgcctgccgtcgaggatctgggctatcactaaaatgcctgccaccggggatctgggaggtcgctaaaatgcctgccaccgcttactgggaggtcactaaaatgtctgccacgggggacttgggctatcactaaaatgcctgccaccggggacctggtaggtcactaaaatgcctgccaccggggatctgggaggtcactaaaatgcctgccgtcgaggatctgggctatcactaaaatgcctgccaccggggatctgggaggtcgctaaaatgcctgccaccgcttactgggaggtcactaaaatgtctgccacgggggacttgggctatcactaaaatgcctgccaccagggatctgggaggtcactaaaatgcctgccaccggggatctgggctatcactaaaatgtctgccactggggatctggaagatcgctaaaatgcctgccaccggggacctgggctatcactaaaatgcctgccaccggggacctgggctatcactaaaatgtctgccactggggatctggaagatcgctaaaatgcctgccaccggggacctgggctatcgctaaaatgcctgccaccggggacctgggctatcactaaaatgcctgccaccggggacctgggctatcactaaaatgtctgccactggggatctggaagatcgctaaaatgcctgccaccggggacctgggctatcgctaaaatgcctgccaccggggacctgggctatcactaaaatgcctgccgccgccagggacctggggagatcgctaaaatccctgccttataaccaacccctagaggtcgactaaaatgtctgctgggcagagcagaggtgatgaaaatgtctgggatagcgtagagatggttggctaaaatgttacaggtagatatgcaaagcgttcaataagcctggcgtgggtaataaactgcagtctagagcggaaaagaaagttaagggcgtgacttgtagcagggtctagaatccacacactcacatcagggaaagcctcgtgtccgaaaaactctttggaatagtcttaatattttaatattgctcaagccaaattcagcaatactacctcaccgcacgtgtctttttcaggtaagatttttgctcttttttttttttttttggtaacaattttcccgccatgtgattatgctaaaaaccaatgggattctacctccgctttagtggggttttctgattgtacgcgtttggattaaagttgatgaaagaatgtggggggggggcacagattcagaaaagtggaaaaattactggtagcgtgtgaagtaaccaagaacgagtaactaagtctgcgataactttctttgagaagccttggaagttgagacctaaaattttggtactgcgttccgtttatttccgaggtacataatgacccgatctctggtatcgttgaaattcgaaaataatctgagtgctttgaaaacccattaagtttctactatctgggacaaggagtattttcggggtgggggtggcgggcaaggcaaaacaattctcagtggttcgtatctgaaaaatcatattcttatttactataggcacggaaaatccctcccggtagtgtttattcagtgtgttcagacgagcaaacaatggcactaaggaatgaatccagtttagaaaggagggaaattaacaatcagctttggttttgatgcggatttggggtgaattttgtttttgttttttttttaatgccttatttctgagacaaggtctcagtaaataacctcaaactcgcaaagctctgcctgccactgccttcagtgggacagtgccgattttaaaggcttctgccgccatgtttggattaatgttcagttttcaattcggaagagaagaaagatttgcaaagtactgattttgtaatacctatgcaaattcttacctgtgttagtaggcagacaaacactgactccccagaatatactaatatactatattacattggaggaagaaactgaggtttctaatcaatcgaccttgagataaaaagattcccctagaaggtaaggtgttgtttcattgaaatggcagggataaaagattgacaaagactctacatcggctatagacatagaggaaggcaattactagctaagaaatttgaagctaaaaagggcagggaaatgaattctctagacttacagaaggaataatttcaatttaatttcaaataataatttcaatttcaactaggtgtctcacactgaacttctgacttctaaaattataaggttatagatctgtgttgctttaagccaccaagtttgttgggggcttaaacaaatacagcactgtagtgctacctgtgtctctgtatcttcgtagaggttaaggtggttatgaagacatccagaaaaggaatcatgagataggctaaggcacagagtatgtcttttatttacagtttctttgtagaacacctttacctaatgtcttaatcagctaattagcatagtaaaatacaactttgggtagttagagaacaaatagtgtgtcatagctcaagaggctagacctctctaaaatggaggttgggtctggtgttatcccttcctgtcttcctggattgtgaatggctgccttctggctgccctgcgtctggtaaagagacagacaggtttaggctccattcttaagacctcatttgatttgaaattacgtcttttatttaaaggttttatgtacatatgcagtcaaattcgaatggtttctttcttgcgcttgtgtgtgtgtgtgtgtgtgtgtgtgtgtgtgtgtgtgttcatttttgagacagcatttctctatgtaacagccctggtgtcttggaactagctctgtagaccaggctggcctcaaactcacagagatcctcctgcttctcccttcttttcttgtgctgttgaatagaaatagcctcagatctggtgaataatgagttgattactcaaaaacaaagttggaagcttgtttacatgtgctgatattggcatgcctgagcagccagacagctttttctgtgcaatgtaagtagggtcttctactgaaatccatttggaattatatatactctataggtctactttattattattttagattttacgtgtatgagtgttctgcttgtttgcatgtttgtgaatcatgtgtatgcctgttgggcaccaatgtcagaagagggtttgctaggatccctggaactggagttatagatggttatgagccacaatgtgggtgttggaaatcaaaccaggtcctctgtgagaacagaaagtgctcacattaaaaaatagtagttatagctgggcaggtggctcacacttgttagcactttaaaggcagaggcagaaagggattgcagctagttcaagactagcttgggctacacagtcagttcctgaccaacttggctagaaaacacatgtttttgttttgttttgttttgttttgtttttaagtaaacatctgagcttactatttaaacacacacacacatgagggcatagccgcattcaattcatagcaaataataaaacttttatcaataaaaacttatcaggtccttgtataatgaaaatgaaagttgacgaataaacatgaaagcccaagaaattagaataaggctggaagtgaaagtccaaggtaaatggaattataggggaaagtgatggtttgaatgttgatggtaattgaggagactacacatagaaaacatttaaggcaggcattggcataagtgaggatttgattgggaagactaactcactttagacaaatgggtggatggtgtctttatcagagtgctatgttcaaacatacccttaaattgacttttcatcctcaagatttcttatgccaggaattccttttagtgttggattttactaccagtggtaaaaatatgaaagtgggttttgtttttgttttgtttcgttttgtttcacacacacacacatacacacacacacacacacacacacacacacacacacaattgtttttttgttttgttttgtttttttggtttttcaagacagggtttctctgtgtagtcctggctgtcctggaactcactctgtagatcaggctggacttgaactcagaaatccgcctgcctctgcctcctgagtgctgggattaaaggcatgcgcatgcggcaccacaccctgctcacaattgtttttaaatatgtgtgtctgaggcattggccccctggagatggagtgacagaggcttgtgagctacctgacttaggtgcttgctagcaaactcaggtcctctcagcaagagcaacatgtgctgctaactgctgagctcttcttccacctttgttcttttgagacgcagtctcatgcagtacagctggctttgagtttgctccgtagccaacgctgaccttgcccttcctgcctccaccttccaagtgttgggttttccctatatttaatatttatttattccttggcaatttcatacatgcattcactcgtacttctcccccactccctacacatcccgaagctgtcttcctataaccttaatgaggtctccttttaaaataataataataatataataataataacaaccctgtgagtccagttagcagtgcttgctggaatgttggctaatcttgtcggaatcgtatgcaggtagccacagccgcagtacgcttgtgagggcggcagccagcattttcacagcttgcctccccatctttagctctcatgttctttccagccctgcttccacgatgttccatgggccttgggcagtgtgtgggttgctatagacaccttgtttggagctaagcatgcaattgttgctcagtctcaggccagctctgagtctgcattagctgctcctccttgcagaagaaacttctctggccaaggtcgaggagagtacagtattgatttgttcttgagatagagttttccagggtagccctggctggctcactatatagtatagcccaggctggtctcaaactcacagtgatcgacctgcctctgcttgccaagtgctgggattaaaagcacgtccctctctgcctggctcgacttattttttgacatggggactcactgcctggtgtccccctcctcctatagcctcaaaatggctgagcaagagtcaggtaacttgcttctctgccattcctgaagccctgtgttccatccggaacctgcataaaccaggtgaggggtgtgcttgtagtcacagcactgaggtcaaggcagaagtgtcagaaattcaaggtcatcctatctacaaagagaatttgagaccagcctgggctacaagaccctgtctcaaaacgtacaaacaagcaaacaaacaaaaaacaaattcaggagctgagagacggctcagtagttaagagcactgactgtacttctaaaggtcctgagttcaattcccagcaaccacatggtggcttacaaccgtctgtaatgggatctggtgccctcttctggtatatctgaagacagcaacagtgtactaatataaataaaataaataaacctttaaaaaaacaaaaaacaaattcaggggctccagaagagtagcaaatgttcttggtaaccactgagccatctttccagctctcctgtccttctttctttccttccttcctttctttttcttctcctctcccctcctctcctctcccctcccctcctcccctcccccctcctcctcctcctcctcctcttcttcttcctctctctctctctctctctctctctctctctctctctcctctttctttctttttttttttgagacagagtctcatgacattgcccaggatagacccaattcttcatcttcttgctctaaatctcccaagtgccgcggttacaggcccttgcctccaacaccagctggttcctaggttctagatagctattccaagtaggtagatgcgagggatatccaattatagtttgcttcatttccctagtgggaatagagaataaggccttgtttatttacttacttttaaaggctctcatgtagcccagcccagccttgaattctgatccatggtccaccacctccaggcttgcaatgcctactggcttttttcagacctgtagtcttttgttgttcggtgtgtatgtatgtatttatttagtgcattggtgttttgcctgaatgtaagtctgtatgagggtgtcagataccctggaactggacttacagacagttgtgagctgccatgtgggtgctgggaattgaaccacaaccacggtccggtccggaagagcagccagcattcttaaccaatgagccatttctccagcccctttgtttgtttgttttttagggaccagtaaattaattttaaacctagaaagccctcccttgtctacagaattcttttagttattctttctattggaactgagcttagggtgagtgcttggttagggtgagtgtttggttagagtgagtgcttggttagggtgcatgcttggttagggtgagtgtttggttagagtgagtgcttggttagggtgcatgctcggttagggtgagtgcttggttagggtgagtgcttggttagggtgagtgcttggttagggtgtgtgcttggttacagtgtgtgcttggttagggtgcatgcttggttagggtgagtgcttggttagggtgcatgcttagttagggtgagtgcttggttagggtgagtgcttggttagggtgagtgcttggttagggtgtgtgcttggttacagtgtgtgcttggttagggtgcatgcttggttagggtgagtgcttggttagggtgcatgcttagttagggtgagtgcttggttagggtgagtccttggttagggtgagtgcttggttagggtgagtccttggttagggtgagtgcttggttagggtgagtgcttggttagggtgtgtgcttggttagggtgtgtgcttggttagggtgtgtgcttggttagggtgagtgcttggttagggtgagtgcttggttagggtgcgtgcttggttagggtgcatgcttggttagggtgagtgcttgattagggtgagtgctgggttagggtgagtgcttggttagggtgagtgctcggttagggtgtgtgctcggttagggtgagtgctgggttagggtgagtgcttggttagggtgagtgcttggttacagtttgtgcttggttagggtgagtgcttggttacagtttgtgcttggttagggtgtgtgcttggttagggtgtgtgcttggttagggtgcatgcttggttagggtgagtgcttggttagggtgcatgcttagttagggtgagtgcttggttagggtgagtgcttggttagggtgagtgcttggttagggtgagtgcttggttagggtgagtgcttggttagggtgagtgcttggttagggtgagtgcttggttagggtgcatgcttggttagggtgagtgcttggttagggtgagtgcttgggtttccagcagtatgccagagacttccaagccagccaggactgcaatgtgagaccctgactcaaaaatgaaagaaaaacaaaagcaaaacaattgtctctgtgtgtgcttagtttaatcttatccactccaccttctctccctgataggagacaaatttggttcgagtaaagcacagaggaactaattaacctgagattacttgcagaatagcccttcctgacccttgaaggcgccatgttattacacgttgctgtctcttctatctacagctctatttcttcctcttctttattcttgtgccagcttcacctcactgtgccattgtgccgggagggcagttttaatggccacttgcctgccctctcctgaccttgcgcaaggacctgggttgaggggagggctttgggtgccgtgggctcctcgtgttcccaggccctgctgggcccaggtgcaacatggtggcttcccgccccggaatgggaggagtggactctgcctctgtcattctccagtcgggggaagtgctggctcaggctctgcaaccacagtgcagatgggagaggggccatgggacagaaaggcaaggaccctcagtgctagcagctgctggctttgtgacccatacccagcccagctcctgcctccctcttggatggcagggacagtctgggaacttctacctgatcctcacatctattctctctttccagaagcctcagaaggagtctccctgcccctgagtttccaaagctcctcacccagggggaataaggatgcccatgcatagcaagaacctgtcacttgcaggttgcctggaagacccgggcagctcacaactcatgccttggaccttaactgcctgtttctagttgaggaacccaggctgaggaaaccaagttatatcaccaagagcatttattctagcaaaccatgaaggggctcatgtgtgcctcttcaatacctatgaaaaatttataataaaaaatcctatttaaagccgggcgtggtggcgcacgcctttaatccccagcactccggaggcagaggcagacggatttctgagttcgaggccctggctgtccctctaccactgagccacatccttacttagcccagatcccgcctttgaagaatcgcagtgtttggcttctaaatgaccagggtgacagtcagacgagggagtccagtgctgctgacccgtgcagcgaccctagccatcagggcaaggatgctggcagccctcctcttgactctttttcgttcgttccttccttccttcttttgtgtgatgcgtattgtatatgaatgtggatggtgtgtgtacacgtttgtgggtgagggttgcacagagcataatggagtcagaggacaacttcaggtgtgcatctggccttccacgttgtttatgagagcatctctctctctctctctctctctttcttcctttctattttttaaaacattttgttttacataagtacactgttgctgacttcagacgcaccagaagagggcatcagatcccattacaggtggttgtgagccaccatatggttgctgggatttgaactcaggacctctggaagagcatccagtgctcttaacctgagccatcatctctccagctcagacaggtcttttgttttgtttttgttttttcgagacagggtttctctgtgtagccctggctgtcctggaactcactctgtagaccaggctggcctcgaactcagaaatccgcctgcctctgcctctggagtgctgggattaaaggcgtgcgccaccacgcccggctttaaatagggttttttattagaaatttttcataggtatatagaatgcattctgcttactcttccactttcaatttccctcccgccctggccagcaccccttattccttacaaaatgtctctgtcatatttgctagttttattttgtttagtgtttcatagttcaccccagacatagtttgggaactattaaatactcatcagtggatacgtttgagtgccctgtgtcccaatcctttagttgccagtaataaatggtaaggtttcatgggcttcttggagttgggccaatgctattttccaaagatgttaagatttaccataatagattcttgtacctgcctcactcacactcgcttgcagtacctgtctatctttctcttcttgccaatcacattgtagatgaggcttttgtggttttgttggctcctagtattagcataaggtgaactgatttcaggtaaaatgttgtggcttttctggcccattcattggatggaaacgaaggcccggttttgtgggagcacttctactggttagcaatggctaggcagagccatgtctaacagtacaaactctctcctgagagaattaatctttcctcctagacgcaattttgtcactttgaattttagaactatcagaggcccctttctctattcaaggacttcttgacagccatgttctttcttttcatttcatcttaccagtactcccacttttgagcctcaatattttgcttctcgtgatcttattagatttgtgttctcataatctttctcctgaacaacttaggctctaagttatgagacctcaaattacccaaggaactggctaggcctgcctggtggtgtaggcctttaatccgagcactcctgagtcagtagcagacagtgctctatggatttagggccagcctaatctacatggacttcaggctagccagatggccagggcaacataaccaatttcattacatagggaattaaaactgaggtatctggtatgataaaagggccactgagttagaaactatcatctgaaaagcaggcttagtggtacaagcctgtaattctaacacaggaggatcaggagctcagagtcattccggctacttagggacttggaggctagcctagttctggctccatgcaaaggaaaaggggaatgtggcagtggttaagataccataatagattcttgtacctgcctcactcacactcgcttgcagtacctgtctatctttctcttcttgccaatcacattgtagatgaggcttttgtggttttgttggctccttgtattagcataaggtgaactgatttaagagcactaactgctcttccaggggatctgaattacattccggctacacacaagatggcgtctgtaacttggtttccttgggatccgacaccctctgctggcctacacgggtataacacccaaacctaatgcatagacaaaactcatgcacattaaataaaatttaaggaaaatatcatatacagcacatgatgttttcaaaacaaagcattttatttaacagcaaactaccccacccactcaaccacccacccacccacccacccacccatccacccacccacacacggactcattgtgacatgttggtaagcaacagttttttttttcaagtcttcaaaacacccaagagtcaacagaagttctgtattccgcatccgttcacaaagtccaggtgttttccatgtgttttttcacagttggtgggaagatgactccagtctttcaacaacagattggtacacagttcatttatgtgatcaaagcagatgatggtaggatgtgcttaattggtagcaatattgatggcagtaactgtgaaaggaaggctttcagttattttttcctttgcaaattccagaaatgtaagcccattcctacccatacaaagggatattactgaatccagccaatttccactaattaaaagctaatattagtaacacttttgatgcccaattgagtttaatgaaaatgaaaaaaatttgtttgaactcccagacctcttcaacctggctccatcttctctgttccttttcttttgcctgaatgtcctgattgggttactaagtaaagtctagatactttgaaagtatgcgtatgctacaatgaataagcttccttacagcaaattgtgacttcagctctaaggcaacttggataaagagatcacattgacttaatctgtttcattcccatttgactcaaggcttagctgatagccatttagatgaaaatacattttcagaaacatttagcgaattaataccaattttgtggaactgcattaaagtcccaacttagattccagatagacaggctggaccctttccttcactcggcctcctgtcccaccctctgtgagtgaaagaaaaatggaaagggtcaaagcacaggcatttttaatctttttcaagttctttcaatttggtctttcgttcctccagttttctgattgttgtcaattttattattcttaaattttatgcaagaatgttaaacattaatgttattttcatccactggcattattttaccatagcaagccaccttgagtatattatagtaaggagaacatttctaaattactgtgagcattagcatgtaaaaaggtaaaaggtttaacgacacaggcaaaattggtcaatgtatttcaaagcctgctgcagctcaaaaatggcttgtttgccccaggataatgcaaagtagcctaagattgtgaacttagatggctgtcatccctcctgaccagtagtggtcacagtcatagctaaaatggcctagaaaattgagtttcttagcgtggagggcttctgtaactttagggtcaggcttgctacaaagcccagcttcccactcattgcagtggccggagaagacatgaggatgaggactcacattgcatattacttggggactaaggactaagtcgtgccactacccagaaaagagacccccccccccatccagcacttccctatgtctatgtttcctttttccatgtctcaggagccaagtgaaggcctaagagacatgcaaatccttgtagaacaggcgaaccaataaagcaaatgaatgaataataaccttcctgtattcaacctctgaggcaaactgtgggaaatgaggaaagtgttcttcagtctagaaaacgtttgagctaatatttctgtttaataaagagcatccctctgctttccggggcatctgtaagtcacactgagtgcccttttggaacaaatgtgttgcacttagcatccagtagcatcttctgcaatgtgtggaaccgaggaaatagagaacctcttttattatttccactctaccaagcatgcccatgaggaggggagcaactttttatttaacttgcctcctctacaccttgatgtttttcccagctaaagtgagagctgtagtctcaaggtgtgactgcagtcccctcagaaactactgaggtaaagtacactttgggttgcatcctttaaatgtctttgttcttttcagtacttagaaattttagtacttagaactgcactttcatcacacttaagttaaaagtatgagtgtgatagtatattcttcttgctcacatgacgctgagccaggcaatgaacaaatacgttagaattatcgattcatcttgattctcctttgaaacacttcaacagtaagaaaaggaaaatgggtaatgaattaaaggacagactttaagtctgtcctggcttcaagctaggccaatgagaaaatgacttttggagcttccttagctaggaagtctccagtttatgttgaaggaatcttggccttggttgggtttcgcaaacagccattatagttaaaatatttactcagaaggctggagagatgactcagtggttaagagtctgactgctcttccgaaggtcctgagttcaaatcccaacaaccacatgggggctcacaaccatctgtaatgtgatgtggtgccctcttctggtgtgtctgaagacagcaacagcgtactcatatacataaaatatataattctttaaaaatattattcactcagtaatcagatatattcttcaggctgggcatgggttaagcacatctgtaatctcagcacttgagaagctgtgacagtcaccaattagaaccagcctgggctttatgagaccatgtctcctatgatcagtgatctacactaggtccacctcacattttagttttaggacctaggttagcatatttatatacaatgtttcattaggtgttgtgttctgcatgcttggtccctccagccagtacatctagttcgagaggttctgggccacactgagtacatgccatcagatgctctggcctcttcccgttttgttccctgatacccatgctctgggattatctcactctggccctataaaactcctttactggcaaggtgtttgtaattcatctctggcagcagcattcaacaaacatttaggaactggatgggaaaaagttcctgtcattaataaaaccttttccacctcctcagtcaagccagctgggaagtatcctagacagcatagtccactcagtgtaacatttagcacactgccttgcacaaatccattttttttttctgttttcatttcctcattgaagtgaattgaagttttggtctagatttcactcctataagtgctacataatgctagaaagcaatctatgtgttcgctcaacacatagcatggtaaaattattattaggtggtgttaggtgataagcattatgattaagtttcagccattatgaaacttagaaagtaatcactgttcactgataaagccaacagttaggtcccggctttatagaactgtagacttcacaaagctccacacagatctgttgtgcatgcctgggataaaagcaaagtcattgcacaccaggcaaatattgcatatatacacatatatatggcagtttacaaattataaattaatctcatgcataatttctttagatacacaggacaatgagaatgctctttgcatcccagtgcctagcaagggcactgttttgtaataaatgactgccattcagtatgtactcatcaagtattgaatgcttcatatattcagtggttcacagttacttatttactttattttcacagtataataaatgtggcagaattttaaaagcctggaaattgataccaagtaagaaaatgaattgttatatttatatggtacctccgagtgcataaaatgccaacgtacatattattctcaagtgtggacacactgaaatgtacgtctgtgtatctctccagtacccatgaaagagaatatacacatgggagacaatatttagcctccaggtttgagatggaccttatggtcttcccaggctagcctccaatttctggggtcaagtggtcctgttgcttaagctgagagcacatgctaacacacccaggttgttaactgtactcttcccattatgggctaaaaagtacgatgaaaattttgtagagactatgcctattttataggcagctttatttctatagaaaatttgtcttgtcttatactactgaactgctttatagttgagaagatacccacaaccataatgtgacctgggcaaatgttcttgtcttaacatgcccttatcactcaagttttgactgattaaattaagcattggctcattcattatgaatagtatggaatgcaaacattcttatttcatggcagttactcatgaatatttcatgtacccaaaacaatatcggatacatcagaggtagttagtagtcattcatttgcacacatggaacaattgatagctgtataatgctttatttaatgcattcttttgtaaattctagttctgtggtaatgtccccctttgttattcccagtgctgaacatgggtattcagaaattagaaggtgatcagaatagggtaatcaatcacctgcattagtgacctagtttgtagtttaaaatcagtttccatgtgttttctcttctgctacctggtataatataacttactgagcctcaccaaagcagaagaaacacactggccttaagtatatggactgttattcattcaagccccgttatgttcatatatttgtttttacaaagcatgttattcctagagcaatctttgtgcctatagcacacagaggcgtagactttagctactatgtaatacatactcagcactgacttggaagttacagtaggcttcatggtttacgtattcatacgtttcctggttacctggtaatatcttgttacctgggggtgaccacagtgaagcatcacagccttagtattcagcacaaaaaatatgcagggaaggaaattaatgttactcagacattccctggcattcatatcagggcttgatcaagtccaggcaatagaccagtgtgcctttttcttaccttttgaaaaggatttgcaactaaggaatatgcaactaagaccatgaacccacaaagcttcaggtacttagtctgatgccttataggaaaagctctacactttcagataataaccatgtataattgccaatgtgctatgagcatgtaactttttcatcctgtgtcatttaacttccctcttacagaggaagaggaaggcacgaaaaagattaagcccgttaagtagtccttagagtctctcatcattaattttaaaggtaggtattagacccaggagttcctttggtgaaatgcaccaaattactcggccactactatgagcagggagttcagacctcattttgtccccaaaccattattagaaaaccataccctgctcacctaagcccaaagaaagaaggtgacactggctggtgcttctcagagggttggcacatctgcatattgcttgtctaattcttctcattggtctggaacaactctttatattttctctagatagcctgacattgttttccccctaacaacctgatgctttccttttcttgtcagcctagggcttctgaggtagggaggatggcagtatgcatatctgtatgcatgcttattcctagggaagtttcaatagtcaggctatatacactggctggatttagttccgtctcaagtggagcagatgtgaagagaaatggaagttgtaaaacatcaacaatttaacaaatggctaagacccagtttaaaacagacccttgcacaatactatccagctaaaaacgtattcctttatgggcaatggcaacaatgaaaaattacatctcaagtgaagacagcttaaatagaaatataagaaatggaaagggatgctggggttggggggcaggtctcatcttcgaatttcccttcttggtcttggggatagaaggatagaaatatccttccagagttctgggccataggcctttatctcttaaatattctgtccatataggattgggtccttaggtcttatgcttggacttagctcaggttttgtgtcttatgacatacgtagttccccgctcttggaagtcacaggtgtcctgtagaaacagttcctcttctttgggttgtcagcattcgttccagccagctcaagacgggccatctgtgtattttggtccttttaaatctcaagtcgcaaaacttctgtcttctacttgggcgttcacttcagagccacttgaatcctgaccggacggaatgatgtattttgtcttagattatttctcagggcagtctggtgtgaggaacggctccacgggtgacattctggacctattgggaaggggctatgaagctcctctcacacatgacacacataacacacatgcacacacgcacatgtacatacaaagaaacatccaagaaaggattactttagaatacaagagagacacagacttgtaaagagatgaaatgctcaaagtgaacagaaaggaggaaagtagaagatagaaacacaagcaaacacaaagcaacagaatgatgctgagataagaaatccaccaatagcaaagagacacaaaatcaaaagaaaacagagaaagtggcccaagaaaggcagggaagaaatgtaaacaagaattcactaaggatagaagcagcagaaagaaaactgaaatggactgacaaagagaacttgaacaaagaacaagtggggtgagcacaagaaaaagagagggatgcatgcaacatgtgacccaaagggagtcacgaaaggcaggagtgaaagaaaagctaagagaaatagcaaccagatagataaaacagagagccatagctagtgaagacaaagcagaccacacaggcaccagagaaagtgaaacaaagctcaaagctctgcaagaaagaacatgcaggagaaacatgggaataggtaagacacactgcagacagaaaagacacacaaaggaaagaaggagacatgcaaaggaaggaagaaatagatgtaacaaagaattagacacacaaggaagaagtagatacacaaaacaaggaagacatagacacacaaagcaaggaagacatagacacacaaagcaaggaagaaatagacacacaaagcaaggaagaaatagatgcaacaacgaattagacaacacaaggagacatagacacacaaagcaatgaagaaatatatataccaaagaattagacacaatgcaaggaagaaatagacacacaaaagcaaggaagaaatagatgtaacaaagaattagacacaactgcaaggaagaaatagacacacaaaagcaagaaagaaagacacacaaaagcaaggaagaaatagatgtaacaaagaattagacacaactgcaaggaagaaatagacacaaagcaaggaagacagacacacaaagcaaggaagaaatagatataacaaagaattagacacaatgcaaggaagaaatagacacacaaagcaaggaagaaatagatgtaacaaagaattagacacaactgcaaggaagaaatagacacaaagcaaggaagaaatagatataacaaagaattagacataatgcaaggaagaaatagacacacaaagcaaggaagaaatagacacacaaagcaaggaagaaatagatgtaacaaagaattagacacacagaccaaggaaaaaatagatacataaaacaagaaatagacacacccacaatacacactcattctattgcttttaagatgctgcagtcaggcatgttgatcctcgggtcatttataaagctgccttccttttgtgtgttcacattgcttgatcacgctgaagacccagttttctgtgctgctttggggaagggtaatatttggtagatggcactacaaagaacaaaagaagctgtatgaatgccaggaaagaagtactagaacatcctggctctttaaattctgcctaatgatagatacttctgtatcaattccagccaggtttccatttgtagttagaggcattcatcatcagtaatgttagtgatggctcagtggttaagagcacctattgctcttccagaggtcctgagttcaatccccagcaaccacatggtggcgcacaaccatctgtaatgagatctggtgctctcttctggtgtgtctgaggacagcaacagtgtactcgtaaatagctaggtaggtaaataagctactcacttgtgtattatatggcatgagtagggtagcagtgcatcttgaagtatgtaaacagctggcaaagctttcctagcttctggagagagaaccaaatagagcagaatggcttcctcgaaggtcagtgccactattgcagcagcttttctcctagaagaaacatttgcactgtttagttacatttcccagatgtgggaaaaagataaaatttatgtatatatctcaagtaaaaggctgactttaatggaaaacaagatcaaagttaaaattattacactgttgcagaaaacttacctactttgatgtagggtggcattctttgagcctttgtcttccttgctgggttcaggaaagcgtctcactgaaatctgggctaggcctgttgcccagtggtggtgagctattcccctggaggatcctcatgccccatctccacctagggatcgtcaaagggaataggtcgccagcactgcaaagcagcaagcccacaattctggggggagatctggaaaagaggtgaaagaaaagccaattcttgaaatcaagaatactgggaaagttgtctcattatgtagtaaccagcagttgtgttaaatcatggggaggggcttggagagtgaacccttcacatttgtagatcttagtgttaacttagagacatgagaattgctccatccaagttctttctggcttttattctgtcacctaccaatgagagatcctttagattataggttgtgttaaagtccttgtacttcaaatactctgggaataaaggggttaaattattttcttcttttaatttgtgctttaaacaataccatgccagaacactggcaaggtgaatagcattgtttggctcagtgcttatggtgcatatgtccctagaaactggtgtagcattggacctctgagtttgaggatattcagagaccagaattatgacaggcctacagaatgtgacaacagccatatctacttactctatcaagtacaaaagactagggtgtcagaaactggccttcattcctctgataacctaccttttaggcatttcagagcagaaatgttacagattggtcataacatggtggggatgatttcaaggcctcatcataaggcaaggatctcattggctaactgactatgccaggggaccaggagatggggagtgctttattgacttgccccctcattctctgatgaactggagatcagatagaaacccccaaatagcaaattctccaaagtacctttttttctccatgtggcctgtaagctttttgttcagagtagcgaggacttgaagagaagttctgctgagatgtaatgtagctgtataggctgctggcagtccttgagtctcacatagggattgtttgtccctgtgaagaaatacaaggctatcattagactacaaaaattgttgaaaattccacatgaaaataatgaggtatttacttaggaggtataacttgacacattagacctttaagggaagatactatctcagtcaaccaagtaacggaaatacctttgggctctctccagcactcttcactcctctaaatccaggcaatccttcttcttgaggcaggagcacaaaacagactccaaattcatccctggaaaacaaatgataattatactaaactctacaaatgataatttgattactagcaatacaatcttcatatgcacatgtcagcgttttcaattggtggtaagaactcagggtgaggatatgttctcatggaacccctagttcttaagagatgtgaaaacagcctttaaaattgaaagcatgtctacatttcaaaggcctttcatttcttttccctttttgtatatttgagtactctatctgcatgtatgcctgtgtgccagaagagggagtcagacgtcattacagatggttgtgagccaccatgtggttgctgggaattgtactcaggacctctggaagactaacagaaccatctctccagctctcgtcttaagtgagctttctcttttcctgttttatttaaaattaacaaaactttcttatgactacacaaatagagccatcttcccctgggatgagccagaggactaagtaaggggcaggcagaagaggttcactggactgggagagagggcacaggttggacagtggctaggttatatggcagtatgcatacaaagacctggtctggttctgccacagggctttgtaaaatcagctggcaaaatccactacttccacttcccaccacttaatgaaggtgtacattctcaaattcacttgttctacagggttctttgtttacaaactcctaagtctgggtcaagccattggacagcttggaagaaagctcattcttctttttttttcaagacagggtttctctgtgtagccctggctgtcctggaactcactctgtagaccaggctggcctcgaactcagagatccgcctgcctctgcctcccaagtgctgggattaaaggctcgagctaccactgcccggctgaaagctcattcttaatgtatacagttcaggcagcctgaagatggtgatggcgagttggtggctttccattacatgattactgacagtgagggctgggtcaggacactaatttggggaactctttgtattccatcaattatggggaccaaagatggcctccagatggttttgtgtgatggcacctcctaatggacatttcaatcacagacaagctcatgttccagatgtcctactacaaataagtgtgtattttacagtgccgtggaggtcatgtaggactaggttgccatgacagaattggccctgattaatgatctgcctgctcacacaacttgatcatttcaatagggaactgtcagtgatagtgggtttactgtgaatagcagcagtaccagcttcctccaggccactaactggagtctgagtcctaatctctatttaggtccataggaggcaggctgaaagctctaggtgcctaggcaagcctggggggggggtcactttgcatgtactggggtgggtagccaatggtgctaaggtgagaccgaagctttagctaactgtcttagtgcaccaaacacattctttagcatctcaaaaagctttttttccttgcaaatgtttccttttgaagcagttacttgtacaacaatggtcctagtttcctaaaagactcaatagttctagatgtattatcacctagagagccagacaatgctaagcctttggagttgggggaaacctgctgcgaaggaatttacagtggacttaaaagggttaaagtactagagggtcatttgcacgtacaaaaggcaaatgcaaaaaaatgttaagtgttatggacaaggatgttttttcagctagaccattttctacacaggagtcaagtatttgttgttttaactgaaagtatctgttgaaaagtgctggcaggggtccagtgtggcacccacccttaatcccaacactctaaactggaggcagaggcgggcggatctctgcgggcggatctcttgagtttgagttccaggatagccagactacacagagaatccctgtcacaaaacaaaacagagaacaaaacaaaattaattgattaattaatgaaaaagaaaaatgagcaaggagggtacataaagtagtccatagtaaaatttgttcataaaacttatccttctttgcacttttgtaaaaaaaaaaaaaaaaaaaaaaaaaaaaaaagattgtaagctatgaagttctctgtctaagctgttagtgccgtccagtggtctgttctgggcagaaatgcagtaaaaatggttgaaagaaccaaattatcaaatttatattcccaattcctacacaagctcatctcttgctacccttggcgtacagctaagcataatgcatggagtctttcactcttaatattctttccatgcttccaagaggtagatagaaacagatggcattcagataaaccaaccagatggtactaatagtcgtctggaccaacaaggcaaagtaagcacacttccctctttaagaagtcaaatttcaaccccagtagacttcctaaaatacttaaacaattcacacaggcagtacatttcctaaaatgatctcaagtgtgcttatattacattaagtcttaaataacataatcatctcacggaagaaattttgtaaaatatcatcgcttctcattttagtgtaccccagcataatggcgattgggtacacaatgtgttaattctacaatttcgttggcatactatgtgttgtgtatggataagctgagaagagctagtgacttattagtcactttgacttttcagtgggtggcacagaaagaaactcgaatgagaaaaagatagcttagtagctaacaaggtagtacttactgtagtctaaacagccagagtctgatgtaacggaggagcagtagttcaagcaggatcctgcactgggatgagttacttgaacatcctcctcagaaaaatagtatcatttctcagtaatgctgggagaactgctgttgtgatgattattttcatcagcaatgtcatatcaaacactcagcagcgggatggcaagatggcacgcggagggtaaaggcacttgctgccaagcctgatgatctcactttgatctccaggacccacaagatagacgaaccagctcccattgttgtctgagcaccatgtgaatgaatgactgcgcgcagcaacatgcatgtacacacacacatacatacactcatacacaatagctcccaaaaaagacctaagtactcggcggctacaaagcacccttcacactagagaaagctcttttcttactaggaaaatctctctttgaagtgtacgtttaaaggaatgattagatcctggcagacatattttaaaatgtaaagtggggaaacaggttctatcatctctaaaataaattcccactttaggaattttcaagctacttcaaattattgccagagtttaatggtggatagaatgaattaattaaatgtgatggcctatataattttcaaaggcgacttgacatgttctcaaatttaatccatccagtcaccttttaaaaataagcaaggactggtgaccaatgtcagacaaaatataatgattagaaggcttaggtcatcttccaaaaagttaatcatactaaaggccacacaaagattgactttttcgttttgttaaacttgtagtaaagaccaagcaaagatacttgtcttaaacattctgcaatagttgcactgatctttccacagactcatcaccctcagtacactgagacactgcttagtcttcagaaacatgacacaaatggctatttttacttcacaaaagctaatgatctcacagtcaatccaccttgcaatccaaatgcctttcttaaggaataaaattatcaataacttttctggcagttggtcctgtacagtagcaatatacaaaatcgggcttaaagtttcttaagcagacagttggctccttcctggaggaagaatggaaagaaaagtgctaagcttccttctcaggaagacaattttcagttcatactgtaaaggaaagccccaagtaaaaggtggcaatccaactccctgagctacttgcctgcaatattttgcacaataaagcattaataaaggtaggcaagaatggttcctggccctagaatgtgccagcagttggaattggaataatttagaagtgcaagttaaagattgaaggctcatccacctagttttggcctgcttttgctattcagtgtataaatacaccaaaatttattaatgacacatagggtgtttggggtaattaacattacccagaataatgtaagaattcgaggtgtctctgttcagtgggagcaaggagaaggcaactgagacactgtagccatatgaagtgagtaaactggtgttgttgactttaagtcaagagaagggctttgcccagtcaatactgttcaaacaaagaggcaaaagggatggcatgatggaattgagaaagggcacaaactcttccttaatgatgggtttgtgagaattagtgattcagaaaagtggtcaatggacaaactagtggccgggcaaaaggaacactataaagtgtgagattgtgactatttaggattgtatatattaaagcaatgcaaaaagggtcgaaatccgggtcattgttgggtgtacatactgctgtactttattatatcattgggaaactagcaggggatttgctcaagttggagtagaaaataaaccatccagaactgccattgtgcctattaagagtcccaaaatcagtttaaggaagagagcaggtcattcgtcagagcccctgtgctcattgacagtaccgggtagtttcgggggctcagcaacctctgcaataatgtaaaggggacaaatattccagacattcatagttataaatacgctaacttagcaattaattctgggactcagtagccttgatggtatgcaaagagagcacacaggtccttgacatttttgcatagtaatcatccaaatgctgaggttactaatagttactaccactcagcagccccagtcaaaaggtaggcatttcagaacctttgctgccgcacaggtcatatgtgtaagggtacagattaatattgacaagagaagtgctcagaaataattaatatgcctctggtgtcaaaagagtacaaggatgtaaaatccaactccaaaggtaatgatggacaactaactgcattaatgcacttaagtccaaatgaagagcacttcgtacaaccctctttctgctttaaagcggagaagagggtacagtagttcttagagaagtgcttagacatgtgaactttccaaatgaaagtcttgagcttattatcacttcctgctgaaggtgctaaggaagtgagtgggatcctttcaagtgcacagagcaggtggcagtgcatacgcatacatttaatatatgataacagtccaaaagaatgcggccttgttgatcagcatatcctgatatagtgcaaatgaaaggcgaaggagtatggcctttgtttactggcaaagacaaaggaagattcactgtatattaatggtccactagcagggaccttgggagataaacggtatcccttgcaggagtgcaagagatacaatggtccgaaaagtaataaggttgtggataagtgtaattttacacattaactggccaagtatttttattaaaatgaatggatcatgtccctgttatatacattaatgttcaagggacatgttatcaattaaaaaccccatcctttatgcaaatattaagtctttaaagtaatagtcctggaaattaaagagtggaaaggaggggacagccttatccagtgtccaggaagatgaagaagccaaaagattagtgacccttgctgtactgcaaaagggtttgagagtaggatcgtatccaaatggaatgagatgtgtgcagtaaatgcatactaatatgcaaggtacatgtttatggccattacagttttacgctgttcaggtttccttctgtagtgaacagaaaaaggcctactacaatcagtcattattattagcaagccacaaaatgggaccttataggtcaacaccacttctgtacttcaaagttaagagtaaaattgatcctactaaaattgccagtatgtacataaatagtttgaggaaggggtttcaagtgcacagcacatacataattccataaagcaaagaggatatgaatgatcagagacagaagtcttaccttgaaggaccattgaccgtattggaatcgtttcaatctatagtctcatgaaagaagctttatattagtgagcctctttgctttgctaagtacaggagtcctgatctaaaaggcacaactgtggacatgagaatatgtacaatagagttaacactgtgcacatttactatgttaaggatcttaaatactgctgcaatacaaataagtcttcaccagatgcagattactacagtgaaatgacatatgcacattcacaatatgaaagactgcatgcagggcatagtggtaggaaccagatatgccaacacttgttaaacgcaggctagatcctgagctcaaggctagcctgggttatatgctaagttccaggccagcctggaagttaaaaacaggacagatcaaaggtcttcttgattaccaacaaaatgacttgacttagtttggtttctttatccaatgcttaggaagagggacaaatgcagctgtgcacacaacaggcacaaatatgtttacattacaggtggcaatgcctgtaagtcccgcccagcccaggctacataagaggctgttctctcaaaccaccacacggtggggctgtagctctatgacagtgctttactagcgtacacaagactcaaggtttgattccccagcacagcagaaagaccagaacagagaagtggtctcattggttggcacccttgattgtcacccattagggtatgagggtatgggatcttggttactaacagaaggggacttgaacaactgcaattttgcacaattgtgtaagaggcattaagtaatcagcaccctctttacataaagcaagggtagtattaggaccttgagaaaagactcaattcctagtcaggattatccacataaaatgttccagtgcagaggtttttggctgaaataagaaagcatgtgagactagtatacaatatcatgagcaaataaatgtatctccatcagttagaaagatgtgacctggggcgatagcacccatgacagcatgccaacagtatatagtattctaccccctttaatggccaatgccttgaaaattgggactgagcactttaactgtctgataacagacctgtgtttgcccctttgctaaatgcacacagggctggactagctaaagtctaatccaatggacaaaatatttctgacagaattattcagtactcaaggtaatacatgagaaaagacgactgaacactgcttagaaacttgggactgtgactactacagcaatgacagaatggttttctttccttaaaggaaaaggagacttgagagatgataccctcccatggcaagtctctgatataaaactcttgtttgattggtgtatcttgattaacatgaaggacaagagttctttgtttacttgtccatggacaagtaaagtaggactgtatgcaaagtgaaattccatgactctggaagtcagtatggaggggtatggggtatagatgggctcagtcttataggctgagtgatgggcactgcattttagcaatacgattctatgcattaagtgaaattccatgactctggaactcagtatggagggggtatagatgggctatctcagtcttataggctgagttatgggcactgcattttagcaatagaaatctatacattatgtgaaattccatgactctggaagtcagtatggagggggtagagggtatagatagggatatctcagtcttataggctgagtgatgggcactgcattttagcaataggaccgtatgcaaagtgaaattctatgtctctggaagtcagtatggagggggtatggggtatacatagggatatctcagtcttataggctgagtaatggacactgcattttagcaatacgattctatgcattaagtgaaattccatgaccctagaagtcagtatggagggggtatggggtataaatgggctatctcagtcttataggctgagttatgggcactgcattttagcaataggactgcatgcattaagtgaaactccatgactctggaagtcagtatggagtgggtatagatgggctatctcagtcttataggctgagtgatgggcactgcattttagcaataggactgcatgcattaagtgaaattccatgaccctggaagtcagtatggagtgggtatagatgggctactcagtcttataggctgagtgatgggcactgcattttagcaataggactgcatgcattaagtgaaattccatgactctggaagtcagtatggagggggtatggggatagatgggctatctcagtcttataggctgagtgatgggcactgcattttagcaataggactgcatgcattaagtgaaattccatgactctggaagtcagtatggagggggtatagatgggctatctcagtcttataggctgagtgatgggcactgcattttagcaataggaccgtatgcaaagtgaaattctatgactctggaagtcagtatggagggagtatggggtatacatagggatatctcagtcttatagactgagtgatggacactgcattttagcaataggaccgtatgcaaagtgaaattctatgactctggaagtcagtatggagggagtatggggtatacatagggatatctcagtcttatagactgagtgatggacactgcattttagcaatacgattctatgtattaagtgaaattccatgaccctagaagtcagtatggagggggtatgggggtataaatgggctatctcagtcttataggctgagttatgggcactgcattttagcaataggactgcatgcattaagtgaaactccatgactctgtaagtcagtatggagggggtatagatgggctatctcagtcttataggctgagtgagggcactgcattttagcaatacgattctatgcattaagtgaaattccatgactctagaagtcagtatggagggggtagatgggctgtctcagtcttataggctgagtgatggacactgcattttagcactgaatcaatgaagattcgaatttctctaagtagaagtgggcttgggataggtctgaaagtatctgggcctggggctaggactgggctggggcagggctggactggattgggttggttgggtggggcaggggcaggggcaggggtaggggctggggctggggctggggcaggggcaggggctggggctggggcaggggctggggctggggctggggcaggggctggggctgggcctggggctggggcagcaatagcagcagcactatttgctgagtcttgaggagaatctagagccataaaggcaagaacacacagaaagttgaaatgtaggccttaatattactattataacagtaagtctgatagaggacacagagcattacaattcaaggctcttgctgacaagtaaaaccattagtcaatatagcatcaacaatagcaacaaaagcaaagcctgaactggtatagaacctcaaatactcctgacatccagtcataatgttcactttacattaacagtatctgtgttataagacttaaaaatttgaagagtagctcggtggatgagtttgaaagaaagtacatttaagtgccaagtaatttgagtatcatctgccaaaaaaattattgaaaactttaaggactccaaagtaacaattcactaaaggtaattaaaatgaattcaacaagtaagcaaatccgtaaatacattttgaaaacaatcacttcggttttaaattcaaacactagcaaagcacactatcagacgtgtcgttggcatccaaaatattcattgaaatcaaaatgcaaccccagcaatagtcatggggtagattttggaagaaggtaggattctacctcttcaccagtgatttgtgatccactatgactctggccaaagtcaccacttatacccagtaggcttagagaaccgcttgagatcagtgctggctaaatagaggccaaggtgtaagtagactagccactgaacaatacaaaggaatggaacgggctgagttttagtttgcaccgccacgtatagagcactgtaagagactatgaacgcaagcggatgagtcaaatgtccttgaaatggccttagatacttttctttcttttaataggtgaggtttcaatgatttacatcgaccaagaacccgcagcctcggtctctcgaatcggatccgacatcatccaacacttcagtgttagaattgcaagcatgcgctctcccgacctgggcaggcacttcgaaaaaatgatgactaaagacacacgtgaagtaccaagcgaaactcacgtccttatgggacagtgactcatcacagtctaattccatcctggccaccaagcaataatgcacatttctaactggaagtcaagcaaacaccaacactttcacacttgtgcccatttctgacgagttacgtcaagtggcaaccaacacttccacttagccttgcctcagcttcgagtggcacaaggtaggaccaaccacaccctaccataatgcaccaagtgtaccctcgggcaaagcccgccaagtagctaaagcccgccaaaaaaaaaatcactgaaagaaaccactagagggcaggtcacatgacttccgccatcttagacacattcaagagcatgtgccacctctccaggctaactcagacatgaagctgacatgtgacacacaaagccctttgcgttataccgcaccaagaacttgagccgccatcttttcctgtacgacctaaatgtcctataatccattgctacacaccagaacaaagattgggctgtcgagcctcgggtggagcccccgagccgccattttatagacttctgagcagcccttaaagccacgggggaccgcgccaggggtccatatgcacacacaccctgcccaatccccacacccacgctgagccctatcccctagtcctctgcggcttccgcgcaacaccgcacactaatacgagcactccttggctttctcttccggctagcacaaccccgcaaatgctaccacaaatcaaggcgaatcccgcaaccccgcacatataaagaaagcctttagctagcgcagcgcaattggttgcttttatccagtccgctgtgctcctcggtgtcctaattcttggcgtaactggctcgagaatagccgtatcacgcagaagccataatggcggacgcgggctctccacgccctgaacacccactcagtttaagagcaaagtcgtttttctaagccataggttcactcacacagcaccaaacgatcagcagcaacagtacacgcaaataagaggcatagatattccaggtagtgcaataactcacaaaaccatatttccatccaccaagccccgttgggcctgtaaaaaaaaaatttaaagcaggtatccacagccccgatgggcaaaagaaaaagaaaaaaaaataataacagcaggtatccgaggccccgttgggcatgggaaaaaaagactaaacgcaggtatccgaggtcccgatggaccgagaaaggtttttttttttttttttttttttacaaaaagcaggtatccatggccccgatgggctaaggagaagaaaaaaagaataaaagcaggtatccacagcccagatgggcaagtttagaaaaaaaaataataagaaaaaaaaagaatgaaaaggcaggtaagtatccaaaaccccgttgggcatggaatggcggggaggacacacaggtatccgtggccccgatgggcaagattatataaacaatgaaagaaaggtaagtccaccatacacacacaagtatcaaccaaaaggcacaacaaagaaatattccttaaaaatgaaaaattgactgaaaatattacaaatatcaaaaagtatggaggacatgtcaaaaaaaaaatcttaccagaacatatcaaaacgtcaaaaatctcgtggaattttgatatgttttcttaaataagccataaggcttggtggtaggggaactaaaaatgttcccccaaagctccttagatggagagaaaccacggaagaaccgcacatccacgggaaacgagcaaacaggctggagcaagccgttgcacgcctttaactgatccgcggcgctgaaggcggagagaccagaagaggagtggccacaaagattgcaattctgacatcttattggacctttaggtctaactatattataaaaaaattaaaatgaataaagatggaggtacgtaagctcagtgacatgacgcgtgaatttcattattttgcgcgataatgaaggattatcctattttacagctaaaaacgtttatgtagaacttcacataaacatttgggtgtgtacatttagcacacacctgtctatgcaaaatttcaatatatcttctacttggacaaaccatgtgtcgctccggtcttggacactagaagttcttctgcattagttggcgacctcagatgaggagaggaaagggtagaaatgcctcacaaaatggctccttggttcctaaattatcagagtattagttgtgaccgatttggagggcttacgctcatagttttgggtcattggcatcttagtctttctctgggaacctggtgactccataccttgggacaaaaacgcactgaagacgttactagctagcagtaatgaaaaataattcctaaatgccaaagcaaagccttagggaataatagctcattggtatcttactcgccccagagacactgctaacttaaaagaactgtcaaattttgttaactgtcaaactatgaatatccacatgaaagagatcagacaccctgggtattagaaaatcaaaggatatgttgtctcgttgatcacgctgacaaataattcacagtctgttctaagttccctttaggcgtcccatgaataataaaggacacaaaattggtttgcttatggacgatcaaagtgccagcaattcagtaatcttactattgaggtggttcaggtagggatggaaaaatatctgctacaaaataaacagtttcaaccaaaagaaaaacaaattaacaaggtaaataaatgatgcacacagactgaataaaccagcaggtggcagcatgaatctttccaaggcatctgaagccaaacttggagtgcaaaaggattcctatctgaattgagaagtaaaggttactttgtctaactttagttgacagagcgatcaggatcagagtaacaagcacaccaaaagcatcaccagtgagaagtcacataggacatattagggaaaaaagacccaaggaagggctcttcacagctaagagcacctggctccacgatggatatggctttgtataaacgagaacttctaaatgagctgtacaaagagaatttagaacttgcgaggtactggtcacagattatgcaagccagtgtatcatttttgtggggatgctagagagaatcatcaaattaaagagttaaatttagtctctgtgttttacttagtcccaattcttgcaaaggtcatcattctttctcacaccgtgtacatcaaggtatgtcaggtttcggggacactttttagtcttatcacaagaaagcatgaagggatatgtgctaaaactcagttcctgggctggagagatagctcagtggttaggagtgctgactgctcttccagagggcctgagttcaattctcaacaacttcgttgtggctcacagtcatctgtagtgggggatccgatatctaaccttcttctgatgtatctgaacagtgaccgacagtgtactcacattaaataaatatttttctaaaaaacacctccattcctgtacacttaactaggtaatttattgcatagctttgtttgtttgtttgttttgtttttcaaggcaggttttctctgatatgccccagatgtcctggaactcactctgtagaccaggctggcctcgaagttagaaatccacctgcctccacctcccaagtgctgggattaaaggtgtgtgccaccactgcctgcctcattgcatattcttaacattaagattaaaaatgcacctggggtaaaatagtaatcttgaggaattctccatgcaaattcaaagaggagaagaaggaagaacaagatgatgatgataatgggtcaagaaacaaggacccactacaaagcagcaagaaacagaaatgggagttaagaaatggtcttccaatgtgcagaggtaagagactttagaacacttggtcctagatgagatgtcttcatcaagccctttctttcaatgctcaggcatctatgaagataaggagtcagaaagactgcagacaaaacagcgcagttttcgttttgtttttaagaaaatgaagtatggatttggatgagtggggaagagttggaggaaggaaaaatgatcaaaataaatcatgaaaaatggtttgtttttttaaaggaaggatgttcaatgacactactggctctgtgaacagagagaaagttggagccacaactataggtgatcaggcatccagtctctccaggaaatctatatttttttcaattctaacgtatattgggagaggggttgatctggtataaaatggttgaagaaacactcccaagttcatgaatcaacataatattgtctaagttgcatcaaaaacccatctatggatttagcgctatactcagcaaaattctaatgacattcacataaatagtttttaaaaataggtgacatggtaagtagcttatgcctgtgaatcccagcccttgggagttacaaggatgtaagcttcaaatgaatgaacaggttgcaccacagcgtcaacatgctactgctcataggtaggcttgtaaattagtgggatagaatagaggacctggagacagccatccactactcaacaaaggtacaaacaccacatgtaagagacatacagtcacttggccaagtgatccttagcatagtggtactatctcaccctatacagaaatcaatctaccaaagatcatgtaagaacaatgactcctacagcctcagacattttatcactaagccatcaggagcggggaggaggtggcactactttagaagaattaggaaggacataagtcactagggagtgggctttgaggtttcagaagcccaagccagggccggtggttggctttcttcctactacctgtggaaccagatgtcaaactccagtactatgtcttcttgaatgctgacatgctccctaccatgaagacaatagactttaaccctagaaaatattagaaagcccctttacaatgctatctcttaaagtgtggtcaaccaggtggacgtggtgcatgtctttagtccccagacctaagaagtgatcaattatggtgcttaagactgctcttagattactcttgagatgcttaatattccagatgaccaaagttcaagatttacactcacactagacaaatctttactggctgtaatttcagtgctaagggatctaaagatcaggctttcatgtgcaacttcacagactttattttaagataacaaaaaacaatctccagcacctcataaaacaggcataccaacttataagttatagtaatagaaagtgaagagtccccagctccaagtcccggaaaaatatcaacaaaatcagaagaaaattttcccaacctaaagagatgccaccctttcccctggctggcagcatggaggctgaacgatgcctgaagtcactgtaaaagatgttaaccatcaggttcgtcagagcgctggcagccttcctcaaaaagtccaggaagctgaaagttcgggaatgggtggacacagtcaagttagccaaacataaagagcttgccccatatgatgagaactggttctacccacgagctgcttccacaactccggacctgtacctctgtacacaactgtagtgcaggagttggttccgtgaccaagatctatgaaggatggcagaggaacggtgttaggcccagccacttcagcagaggctctgagagtatggcttgccaggtcctccaagccctgaaagggctgaaaatggtggaaaagggccgagatgggggccgcaagctaacacctcagggacaggaaacacatctggacaggatcgctgaacaggtggcagctgccaacaagaagcattagaaaaaataatactgggttaataaattgcctcattcataaaaaagaaaagaataaagaaagagaagcctataaacataccagaagcttatagagtaccaattataaccaaaaaaaaaaaaaaaaaaaaaaaaaaaaccaaacaaaacaaaaaacaaaaccctcctggcatgtaataatcaaatgtaaatacaaataataatgttttggagaagatgtaatgatccattccattaatacgagcacttgggaagcagagccatggtggatgggtctcagaggagtgtgaacttaatgtgggcctctgctgtagcagcaagtgttcttagctgctaagccatctctgtggcttcttttattccaaggactgtttaagctgacctggaattcactatgtagaccaaactagccttgaacttatggtgaacttcctgcctacaaagtgttgtgcttacaagcatgtgctaccggtcacagatataagtgataagtataagtgttttattatatataaataagtaaataaatacatagattctatatctgttcttccacttgccacatcagtttttcccctctcagctcatactccggattacatactccggtgttatagtcttggcacaggagcaggcaatgcaagttgatggtcacaattatgcaacctgaggaatcctcagaaccgcagagttctctctagttatatattgttgtgattcttgatttatattacagaaaacttaagaatgcttattgaataagatgaaggaaagatatgagtgggtattgggaggggcatggactgaagtccagcagtagtagctatatacctgatttgtttttttttaagtttctgttatttaaaggaagtattttataaccaaggttgagagagcaaagaaaacatttgttcatcttcccactctacccttgccttttccatttttgtgtgtatatgcattttgtccatagatgtggatacacatgtatataggttcatatgtatatgtgtgtgaatatataggcctaagtttaatgtcttcaatcatttttctaccttgtttactgaggcaagatcttagccaaacgagagctcactgatatggcacgtcttgttaggcaacttgctctggggatccctgtttgagcctttcatagctgcaattataggagggcttcacatgggttcacgccttggggacttgaactctggtcctcatgcttttatggcaaatacttaacctctgagccatctctttagatccccattacatcattgaaaagtattgagtttttaaggtttatttctgactttagttatgtatatggtctgtgtgtgccctcaaagaccagaagagagcagcaaagcccctggagcggaagttataggtggttgtcaactgcctgatagtgctgagaatcaaacttggattttctgaaagagtagcaaatgtttgtaagcatcgaggtatgtctctagtcccaggtttgtttgtttgttttatttaaatgacgttactgagggtactggtgaggttgcaatatgaataaaagagatgtgattaagataaacccatggaatgtgagcagtggaggtgcacacctttaatcccagcacttgggagttagaggcagatggatctctgagtttgagaccagcatagtctaccgaggcagttccagtatagccaaggccacagagaaaccctgccttgaaaacaaacacaaacaaacagaaagagtagataataatacatttggggggctggagagatggctcaacagttaagaggattcgctgcttttccagacgatccaggttcagttttctttaaagaataggccactggcagtttgacctcacgagctaataatgttttatataacatggagtaacttagagtagcataacctgatgacaaaggtggtcaagtggtaagagccatagaagggttcaacgaccctgcccctatcgctggagtattgagatttaaactaaaaataggagagacatttcaatagagaacaaggagtacccataataagtaattttcgcttttttcccctgccgccaccaatttgcgcggaggcagaagctcaggtgcgttcaagattcggcgtcacccataatccaccgccatggccgaggaaggcatagctgctggaggtgtaatggacgtcaacactgctctacaagaggtgctcaagaccgccctcatccaggatggcctagcacgtggcatactcgaagctgccaaagccttagttagacaagcgccaagcccatctctgtgtgctcgcatccaactgtgatgagcccatgtatgtcaagctggtggaggcactttgtgctgagcaccaaatcaacctgataaaggttgatgacaacaagaaactaggggaatgggtaggcctctgtagaatcgatcgagaggggaaaccacggaaggtggtcggttgctgttgcgtagtggttaaggactatggcaaagaatcttaggccaaggatgatatcgaggaatactccaaattcaataaataaataaattgtagctcattatgaaaaaaaagtaattttcttcgaggtgtagcctgactaattattgtgtcttgtggtactgcaagatagcccagagaaaccctcatcttgactggccatggtagcacatgcctataatgggagcagaagaattgctttgagcttgagaccatactatgtcttgagagagttcttgtttttttaaagggtggctcatgtttgaagcataagctgattacttttgccttgcatcatggataactgccctcatatggaagaaggtctgtcctgggaggttttgctcttggagttcaacatgactaaggatgaatgaaataatttaggaagacactccttctgttattaatatgcctatgcacagtcaagcaggagtttgaaatgaacggaaagacagactcaaaatgaaggcagagactcaagtctttaatcctgtggttggttaccttgtgaagccaagtaggccatcaatacctttagcaaaagcactttctgaaaacctgttctaacaggacataaatttctaacaacagtgcaacttaaattgtaagaaaacacaggactgtttcaaagactgatagcatgttgtttcctatgtttcatatacagcctcatggtttgctttggctttgctctccacccctctttcacgtggtctcatgtaattcaggctgatctggaacttactgtgttgctgaagatgagctgaactcctgatgctccttcctaactctctcaaattctggaattttaggcaagcaccactttgctcagcttttctttgattttcatttagaatattaaagaatagttttatttaatcccaccattcagtaggcagagtcaggaggatttctgattcccagtctggtctacagagcaagcttcaggacagccagggctacacagagaaactctatcttgagataccaataaagaaagaaagaaaaacatttttcttggggctggcaatatggctcagtggtagagcaatggcttagcatgtaattagaaaatcatggattcagtccttagtaacacacacacacacacacacacacacacacacacacacacacacacacacgggctgagtcttgactgcaagatggctcagctgataaggagcttacctcaaagcctggcagacaccctgagctccatccttggaaactatgtggtggacacatccatatattctctctctctctctctctctctctctctctctctctctctctctctctctcccttcttctaccccgccttggtctttctcaaacacaaaaataaataaatgtaaaatattgtaagaagttataggtcatttatataaagaaaattaaaggaaattaaggaaatacttttagatgagaatagagtataaggtttttatcctaaaactaaaagattgttcccatatggacaaaaaggggtgatgagggaaaaaaccagaaagttttagtctattgccaaaggcctgagtatgtcacaagaagtttgtagaagataaagtgaggcccggggaaggaaggagaattgggaatttacagtcattctctgctacgtaataagtcgaggccagcctggaataacgggggccctgtctcaaaaacagaagagcaacaacgatatgcatgcctgaaaagccaaatctttaaaaattagctagagtcacactttcctaggtacttctttcaacagttttgccacagacattagaatgaagttggaaatgcagacagttgggctcccagataccctgaatcaacttttatatttgacttttgttttttttaagtttataaaaacttttttttttttagaatttttatgtgtgtgagtgttttgcctgcatataggtctgtgtaccacactcgagcatggtgtcagaggaggtgagaagcctcatgcagctgctaggcattgaaccccagtcctttgtgagaatattaagtactcttacacaccaagccaactctccagccctgcttttggggtgttcaacaacaaagataagtagaaaccaaatacgcacccagagaaaaatcacatatatacaaaaagccagaaatttgagaggcaatgtgtgtgtgtgtgtgtgtgtgtgtgtgtgtgtgtaataattttcacaaacttgccatctcagagaaactctaggaggaagaaaggattccaaacaggcaaattctggctacagctgaggagagctcgcacaggaaagaactgcctgtaatggaatgaaaagaagccagggctttgctgtcttgggaaagagggaaaccagtgtaagggaaaatgtgctaccttctggagagaggacagccctcggctccatgacagctgtcccaggttgccttagcaaagccttcctcaagcagatattcactgaggccccttcggcaactttccaacatggttttacttaaatacacacacacacatgcatttacttcgtgtgtgtgtgtgtgtgtgtgtgtgtgtgtgtgtgtgtgtgt

SEQ ID NO: 7 - DNA, 4929 bp, Artificial Sequence
  synthetic
gtgtgtcttacctattcccatgtttctcctgcatgttctttcttgcagagctttgagctttgtttcactttctctggtgcctgtgtggtctgctttgtcttcactagctatggctctctgttttatctatctggttgctatttctcttagcttttctttcactcctgcctttcgtgactcccctttgggtcacatgttgcatgcatccctctctttttcttgtgctcaccccacttgttctttgttcaagttctctttgtcagtccatttcagttttctttctgctgcttctatccttagtgaattcttgtttacatttcttccctgcctttcttgggccactttctctgttttcttttgtatttgtgtctctttgctattggtggatttcttatctcagcatcattctgttgctttgtgtttgcttgtgtttctatcttctactttcctcctttctgttcactttgagcatttcatctctttacaagtctgtgtctctcttgtattctaaagtaatcctttcttggatgtttctttgtatgtacatgtgcgtgtgtgcatgtgtgttatgtgtgtcatgtgtgagaggagcttcatagccccttcccaataggtccagaatgtcacccgtggagccgttcctcacaccagactgccctgagaaataatctaagacaaaatacatcattccgtccggtcaggattcaagtggctctgaagtgaacgcccaagtagaagacagaagttttgcgacttgagatttaaaaggaccaaaatacacagatggcccgtcttgagctggctggacagaatgctgacaacccaaagaagaggaactgtttctacaggacacctgtgacttccaagagcggggaactacgtatgtcataagacacaaaacctgagctaagtccaagcataagacctaaggacccaatcctatatggacagaatatttaagagataaaggcctatggcccagaactctggaaggatatttctatccttctatccccaagaccaagaagggaaattcgaagatgagacctgccccccaaccccagcatccctttccatttcttatatttctatttaagctgtcttcacttgagatgtaatttttcattgttgccattgcccataaaggaatacgtttttagctggatagtattgtgcaagggtctgttttaaactgggtcttagccatttgttaaattgttgatgttttacaacttccatttctcttcacatctgctccacttgagacggaactaaatccagccagtgtatatagcctgactattgaaacttccctaggaataagcatgcatacagatatgcatactgccatcctccctacctcagaagccctaggctgacaagaaaaggaaagcatcaggttgttagggggaaaacaatgtcaggctatctagagaaaatataaagagttgttccagaccaatgagaagaattagacaagcaatatgcagatgtgccaaccctctgagaagcaccagccagtgtcaccttctttctttgggcttaggtgagcagggtatggttttctaataatggtttggggacaaaatgaggtctgaactccctgctcatagtagtggccgagtaatttggtgcatttcaccaaaggaactcctgggtctaatacctacctttaaaattaatgatgagagactctaaggactacttaacgggcttaatctttttcgtgccttcctcttcctctgtaagagggaagttaaatgacacaggatgaaaaagtaacatgctcatagcacattggcaattatacatggttattatctgaaagtgtagagcttttcctataaggcatcagactaagtacctgaagctttgtgggttcatggtcttagttgcatattccttagttgcaaatccttttcaaaaggtaagaaaaaggcacactggtctattgcctgtacttgatcaagccctgatatgaatgccagggaatgtctgagtaacattaatttccttccctgcatattttttgtgctgaatactaaggctgtgatgcttcactgtggtcacccccaggtaacaagatattaccaggtaaccaggaaacgtatgaatacgtaaaccatgaagcctactgtaacttccaagtcagtgctgagtatgtattacatagtagctgaagtctacgcctctgtgtgctataggcacaaagattgctctaggaataacatgctttgtaaaaacaaatatatgaacataacggggcttgaatgaataacagtccatatacttaaggccagtgtgtttcttctgctttggtgaggctcagtaagttatattataccaggtagcagaagagaaaacacatggaaactgattttaaactacaaactaggtcactaatgcaggtgattgattaccctattctgatcaccttctaatttctgaatacccatgttcagcactgggaataacaaagggggacattaccacagaactagaatttacaaaagaatgcattaaataaagcattatacagctatcaattgttccatgtgtgcaaatgaatgactactaactacctctgatgtatccgatattgttttgggtacatgaaatattcatgagtaactgccatgaaataagaatgtttgcattccatactattcataaggaatgagccaatgcttaatttaatcagtcaaaacttgagtgataagggcatgttaatacaagaacatttgcccaggtcacattatggttgtgggtactttcttaactataaagcagttcagtagtataagacaagacaaattttctatagaaataaagctgcctataaaataggcatagtctctacaaaattttcattgtactttttagcccataatgggaagagtacagttaacaagctgggtgtggtagcatgtgctctgagctgaagcaacaggaccacttgagcccagaaattggaggctagcctgggaagaccataaggtcaatctcaaacctggaggctaaatattgtctcccatgtgtatattctctttcatgggtactggagagatacacagacgtacatttcagtgtgtccacacttgagaataatatgtacgttggcattttatgaactcggaggtaccatataaatgtaacaattcattttcttacttggtatcaatttccaggcttttaaaattctgccacatttattatactgtgaaaataaagtaaataagtaactgtgaaccactgaatatatgaagcattcaatacttgatgagtacatactgaatggcagtcatttattacaaaacagtgcccttgctaggcactgggatgcaaagagcattctcattgtcctgtgtatctaaagaaattatgcatgagattaatttataatttgtaaactgccatatatatgtgtatatatgcaatatttgcctggtgtgcaatgactttgcttttatcccaggcatgcacaacagatctgtgtggagctttgtgaagtctacagttctataaagccgggacctaactgttggctttatcagtgaacagtgattactttctaagtttcataatggctgaaacttaatcataatgcttatcacctaacaccacctaataataattttaccatgctatgtgttgagcgaacacatagattgctttctagcattatgtagcacttataggagtgaaatctagaccaaaacttcaattcacttcaatgaggaaatgaaaacagaaaaaaaaaatggatttgtgcaaggcagtgtgctaaatgttacactgagtggactatgctgtctaggatacttcccagctggcttgactgaggaggtggaaaaggttttattaatgacaggaactttttccatccagtttcttaaatgtttgttgaatgctgctgccagagatgaattacaaacaccttgccagtaaaggagttttatagggccagagtgagataatcccagagcatgggtatcagggaacaaaacgggaagaggccagagcatctgatggcatgtactcagtgtggcccagaacctctcgaactagatgtactggctggagggaccaagcatgcagaacacaacacctaatgaaacattgtatataaaatatgctaacctaggtcctaaaactaaaatgtgaggtggacctagtgtagatcactgatcataggagacatggtctcataaagcccaggctggttctaattggtgactgtcacagcttctcaagtgctgagattacagatgtgcttaacccatgcccagcctgaagaatatatctgattactgagtgaataatatttttaaagaattatatattttatgtatatgagtacgctgttgctgtcttcagacacaccagaagagggcaccacatcacattacagatggttgtgagcccccatgtggttgttgggatttgaactcaggaccttcggaagagcagtcagactcttaaccactgagtcatctctccagccttctgagtaaatattttaactataatggctgtttgcgaaacccaaccaaggccaagattccttcaacataaactggagacttcctagctaaggaagctccaaaagtcattttctcattggcctagcttgaagccaggacagacttaaagtctgtcctttaattcattacccattttccttttcttactgttgaagtgtttcaaaggagaatcaagatgaatcgataattctaaacgtatttgttcattgcctggctcagcgtcatgtgagcaagaagaatatactatcacactcatacttttaacttaagtgtgatgaaagtgcagttctaagtactaaaatttctaagtactgaaaagaacaaagacatttaaaggatgcaacccaaagtgtactttacctcagtagtttctgaggggactgca

SEQ ID NO: 8 - DNA, 4800 bp, Artificial Sequence
  synthetic
tcgtgggtagaaccagttctcatcatatggggcaagctctttatgtttggctaacttgactgtgtccacccattcccgaactttcagcttcctggactttttgaggaaggctgccagcgctctgacgaacctgatggttaacatcttttacagtgacttcaggcatcgttcagcctccatgctgccagccaggggaaagggtggcatctctttaggttgggaaaattttcttctgattttgttgatatttttccgggacttggagctggggactcttcactttctattactataacttataagttggtatgcctgttttatgaggtgctggagattgttttttgttatcttatataaagtctgtgaagttgcacatgaaagcctgatctttagatcccttagcactgaaattacaggcagtaaagatttgtctagtgtgagtgtaaatcttgaactttggtcatctggaatattaagcatctcaagagtaatctaagagcagtcttaagcaccataattgatcacttcttaggtctggggactaaagacatgcaccacgtccacctggttgaccacactttaagagatagcattgtaaaggggctttctaatattttctagggttaaagtctattgtcttcatggtagggagcatgtcagcattcaagaagacatagtactggagtttgacatctggttccacaggtagtaggaagaaagccaaccaccggccctggcttgggcttctgaaacctcaaagcccactccctagtgacttatgtccttcctaattcttctaaagtagtgccacctcctccccgctcctgatggcttagtgataaaatgtctgaggctgtaggagtcattgttcttacatgatctttggtagattgatttctgtatagggtgagatagtaccactatgctaaggatcacttggccaagtgactgtatgtctcttacatgtggtgtttgtacctttgttgagtagtggatggctgtctccaggtcctctattctatcccactaatttacaagcctacctatgagcagtagcatgttgacgctgtggtgcaacctgttcattcatttgaagctttgtcatgtagctcaatctggtctccaattctctatgtggctatttctgatcatccttgtaactcccaagggctgggattcacaggcataagctacttaccatgtcacctatttttaaaaactatttatgtgaatgtcattagaattttgctgagtatagcgctaaatccatagatgggtttttgatgcaacttagacaatattatgttgattcatgaacttgggagtgtttcttcaaccattttataccagatcaacccctctcccaatatacgttagaattgaaaaaaatatagatttcctggagagactggatgcctgatctacctatagttgtggctccaactttctctctgttcacagagccagtagtgtcattgaacatcccttcctttaaaaaaacaaaccatttttcatgatttattttgatcatttttccttcctccaactcttccccactcatccaaatccatattcattttcttaaaaacaaaacgaaaactgcgctgttttgtctggatggtgttttcttggagtcatttactgcagtctttctgactccttatcttcatagatgcctgagcattgaaagaaagggcttgatgaagacatctcatctaggaccaagtgttctaaagtctcttactctctgcacattggaagaccatttcttaactcccatttctgtttcttgctgctttgtagtgggtccttgtttcttgacccattatcatcatcatcttgttcttccttcttctcctctttgaatttgcatggagaattcctcaagattactattttaccccaggtgcatttttaatcttaatgttaagaatatgcaatgaggcaggcagtggtggcacacacctttaatcccagcacttgggaggtggaggcaggtggatttctaacttcgaggccagcctggtctacagagtgagttccaggacatctggggctatacagagaaaacctgccttgaaaaacaaaacaaacaaacaaacaaagaatatgcaataaattacctagttaagtgtacaggaatggaggtgttttttagaaaaatatttatttaatgtgagtacactgtcggtcactgttcagatacatcagaagaggttagatatcggatcccactacagatgactgtgagccactacgaagttgttgagaattgaactcaggccctctggaagagcagtcagcactcctaaccactgagctatctctccagcccaggaactgagttttagcacatatcccttcatgctttcttgtgataagactaaaaagtgtccccgaaacctgacataccttgatgtacacggtgtgagaaagaatgatgaggtttgcaagaattgggactaagtaaaacacagagactaaatttaactctttaatttgatgattctctctagcatccccacaaaaatgatacactggcttgcataatctgtgaccagtacctcgcaagttctaaattctctttgtacagctcatttagaagttctcgtttatacaaagccatatccatcgtggagccaggtgctcttagctgtgaagagcccttccttgggtcttttttccctaatatgtcctatgtgacttctcactggtgatgcttttggtgtgcttgttactctgatcctgatcgctctgtcaactaaagttagacaaagtaacctttacttctcaattcagataggaatccttttgcactccaagtttggcttcagatgccttggaaagattcatgctgccacctgctggtttattcagtctgtgtgcatcatttatttacttgttaatttgtttttcttttgttgaaacagtttattttgtagcagatatttttccatccctacctgaaccacctcaatagtaagattagtgaattgctggcactttgatcgtccataagcaaaccaattttgtgtcctttattattcatgggacgcctaaagggaacttagaacagactgtgaattatttgtcagcgtgaatcaacgagacaacaatatcctttgattttctaatacccagggtgtctgatctctttcatgtggatattcatagtttgacagttaacaaaatttgacagttcttttaagttagcagtgtctctggggcgagtaagataccaatgagctattattccctcaggctttgctttggcatttaggaattatttttcattactgctagcgagtaacgtacttcagtgcgtttttgtcccaaggtatggagtcaccaggttcccagagaaagactaagatgccaatgacccaaaactatgagcgtaagcccaccaaatcggtcacaactaatactctgataatttaggaaccaaggagccattttgtgaggcatttctaccctttcctctcctcatctgaggtcgccaactaatgcagaagaacttctagtgtccaagacgcggagcgatacatggtttgtccaagtagaagatatattgaaattttgcatagacaggtgtgtgacctaatgtacattatttaatgtttatgtggaagttctacataaacgtttttagctgtaaaataggataatccttcattatcgcgcaaaataatgaaattcacgcgtcatgtcactgagcttacgtacctccatctttattcattttaatttttttataatatagttagacctaaaggtccaataagatgtcagaattgcaatctttgtggccactcctcttctggtctctccgccttcagcgccgcggatcagttaaaggcgtgcaacggcttgctccagccatgtttgctcgtttcccgtggatgtgcggttcttccgtggtttctctccatctaaggagctttgggggaacatttttagttcccctaccaccaagccttatggcttatttaagaaaacatatcaaaattccacgagatttttgacgttttgatatgttctggtaagattttttttttgacatgtcctccatactttttgatatttgtaatattttcagtcaatttttcatttttaaggaatatttctttgttgtgccttttggttgatacttgtgtgtgtatggtggacttacctttctttcattgtttatatattcttgcccatcggggccacggatacctgtgtgtcctccccgccattccatgcccaacggggttttggatacttacctgccttttcattctttttttttcttattatttttttttctaaacttgcccatctgggctgtggatacctgcttttattctttttttcttctccttagcccatcggggccatggatacctgctttttgtaaaaaaaaaaaaaaaaaaaaaaaaacctttctcggtccatcgggacctcggatacctgcgtttagtctttttttcccatgcccaacggggcctcggatacctgctgttattatttttttttctttttcttttgcccatcggggctgtggatacctgctttaaattttttttttcacggcccaacggggcgcttggtggatggaaatatggttttgtgagttattgcactacctggaatatctatgcctcttatttgcgtgtactgttgctgctgatcgtttggtgctgtgtgagtgaacctatggcttagaaaaacgactttgctcttaaactgagtgggtgttcagggcgtggagagcccgcgtccgccattatggcttctgcgtgatacggctattct

SEQ ID NO: 9 - DNA, 4317 bp, Mus musculus
ccagggatcctagcaaaccctcttctgacattggtgcccaacaggcatacacatgattcacaaacatgcaaacaagcagaacactcatacacgtaaaatctaaaataataataaagtagacctatagagtatatataattccaaatggatttcagtagaagaccctacttacattgcacagaaaaagctgtctggctgcttcaggcatgccaatatcagcacatgtaaacaagcttccaactttgtttttgagtaatcaactcattattcaccagatctgaggctatttctattcaacagcacaagaaaagaagggagaagcaggaggatctctgtgagtttgaggccagcctggtctacagagctagttccaagacaccagggctgttacatagagaaatgctgtctcaaaaatgaacacacacacacacacacacacacacacacacacacacacaagcgcaagaaagaaaccattcgaatttgactgcatatgtacataaaacctttaaataaaagacgtaatttcaaatcaaatgaggtcttaagaatggagcctaaacctgtctgtctctttaccagacgcagggcagccagaaggcagccattcacaatccaggaagacaggaagggataacaccagaacccaacctccattttagagaggtctagcctcttgagctatgacacactatttgttctctaactacccaaagttgtattttactatgctaattagctgattaagacattaggtaaaggtgttctacaaagaaactgtaaataaaagacatactctgtgccttagcctatctcatgattccttttctggatgtcttcataaccaccttaacctctacgaagatacagagacacaggtagcactacagtgctgtatttgtttaagcccccaacaaacttggtggcttaaagcaacacagatctataaccttataattttagaagtcagaagttcagtgtgagacacctagttgaaattgaaattattatttgaaattaaattgaaattattccttctgtaagttttagagaattcatttccctgccctttttagcttcaaatttcttagctagtaattgccttcctctatgtctatagccggatgtagagtctttgtcaatcttttatccctgccatttcaatgaaacaacaccttaccttctaggggaatctttttatctcaaggtcgattgattagaaacctcagtttcttcctccaatgtaatatagtatattagtatattctggggagtcagtgtttgtctgcctactaacacaggtaagaatttgcataggtattacaaaatcagtactttgcaaatctttcttctcttccgaattgaaaactgaacattaatccaaacatggcggcagaagcctttaaaatcggcactgtcccactgaaggcagtggcaggcagagctttgcgagtttgaggttatttactgagaccttgtctcagaaataaggcattaaaaaaaaaacaaaaaacaaaattcaccccaaatccgcatcaaaaccaaagctgattgttaatttccctcctttctaaactggattcattccttagtgccattgtttgctcgtctgaacacactgaataaacactaccgggagggattttccgtgcctatagtaaataagaatatgatttttcagatacgaaccactgagaattgttttgccttgcccgccacccccaccccgaaaatactccttgtcccagatagtagaaacttaatgggttttcaaagcactcagattattttcgaatttcaacgataccagagatcgggtcattatgtacctcggaaataaacggaacgcagtaccaaaattttaggtctcaacttccaaggcttctcaaagaaagttatcgcagacttagttactcgttcttggttacttcacacgctaccagtaatttttccacttttctgaatctgtgccccccccccacattctttcatcaactttaatccaaacgcgtacaatcagaaaaccccactaaagcggaggtagaatcccattggtttttagcataatcacatggcgggaaaattgttaccaaaaaaaaaaaaaaagagcaaaaatcttacctgaaaaagacacgtgcggtgaggtagtattgctgaatttggcttgagcaatattaaaatattaagactattccaaagagtttttcggacacgaggctttccctgatgtgagtgtgtggattctagaccctgctacaagtcacgcccttaactttcttttccgctctagactgcagtttattacccacgccaggcttattgaacgctttgcatatctacctgtaacattttagccaaccatctctacgctatcccagacattttcatcacctctgctctgcccagcagacattttagtcgacctctaggggttggttataaggcagggattttagcgatctccccaggtccctggcggcggcaggcattttagtgatagcccaggtccccggtggcaggcattttagcgatagcccaggtccccggtggcaggcattttagcgatcttccagatccccagtggcagacattttagtgatagcccaggtccccggtggcaggcattttagtgatagcccaggtccccggtggcaggcattttagcgatcttccagatccccagtggcagacattttagtgatagcccaggtccccggtggcaggcattttagtgatagcccaggtccccggtggcaggcattttagcgatcttccagatccccagtggcagacattttagtgatagcccagatccccggtggcaggcattttagtgacctcccagatccctggtggcaggcattttagtgatagcccaagtcccccgtggcagacattttagtgacctcccagtaagcggtggcaggcattttagcgacctcccagatccccggtggcaggcattttagtgatagcccagatcctcgacggcaggcattttagtgacctcccagatccccggtggcaggcattttagtgacctaccaggtccccggtggcaggcattttagtgatagcccaagtcccccgtggcagacattttagtgacctcccagtaagcggtggcaggcattttagcgacctcccagatccccggtggcaggcattttagtgatagcccagatcctcgacggcaggcattttagtgacctcccagatccccggtggcaggcattttagtgacctaccaggtccccggtggcaggcattttagtgacctcccaggtccccggtggcaggcattttagtgatagcccagatacccggtggcaggcattttagtgatagcccaagtaccccgtggcagacattttagtgacctcccagtacccggtggcaggcattttagtgatagcccaggtccccggtggtaggcattttagtaaagtctcccagtcccaggcatccatttgagccattagtccgggaacgtggcatgtatgttagctatctttccaggtccctgaccggtagtctaaccacctgtaagggacagacattttaaattttggctccaggacccagcagacattttagttattcctccgttatgcggcaggcattttaactatcggttcgggactacgcaggcattttaccttcatctccgcatagctggcaagcattttaggaatctttctgctgcttggcaatcactttaaccatctcttccgctgtcccgcaagcacgtagccatcgctccactgtcctgaaagcactttgccactgtcccactgtcccgcaagcacttagccacctctcccctgtcccgcaagcacttagccatcgccccactgtcctgcaagcacttagccatcgccccactatcccgcaagaatttcagccacctctccaccaccccaacaaggacttcgggcacctctccaccgtcccgcaggcactttaggcatctgccctctccttagcccgcatctcacccaccgctccgctctggccacctgtctagctggctatcacgctcttcttccatcacgcgcttgccgcagccgcctcccgggagtggatgcaggactcaagatgcgtggatatctcggaaagtgagaacagagcaagggcgccgagcgcaagtgtgtagcgcttgcaggtacttttgggaccgagtggagcacgacgtagcgcctcaccggatcttgcgagattgcgcctgacacaagcgctgcactgagggtttgagggagtgtggggcgggacctaaggctcttgaggcgcgggatcctgctgagagggtgtggttag

SEQ ID NO: 10 - DNA, 3695 bp, Mus musculus
ctttaatccaaacgcgtacaatcagaaaaccccactaaagcggaggtagaatcccattggtttttagcataatcacatggcgggaaaattgttaccaaaaaaaaaaaaaaagagcaaaaatcttacctgaaaaagacacgtgcggtgaggtagtattgctgaatttggcttgagcaatattaaaatattaagactattccaaagagtttttcggacacgaggctttccctgatgtgagtgtgtggattctagaccctgctacaagtcacgcccttaactttcttttccgctctagactgcagtttattacccacgccaggcttattgaacgctttgcatatctacctgtaacattttagccaaccatctctacgctatcccagacattttcatcacctctgctctgcccagcagacattttagtcgacctctaggggttggttataaggcagggattttagcgatctccccaggtccctggcggcggcaggcattttagtgatagcccaggtccccggtggcaggcattttagcgatagcccaggtccccggtggcaggcattttagcgatcttccagatccccagtggcagacattttagtgatagcccaggtccccggtggcaggcattttagtgatagcccaggtccccggtggcaggcattttagcgatcttccagatccccagtggcagacattttagtgatagcccaggtccccggtggcaggcattttagtgatagcccaggtccccggtggcaggcattttagcgatcttccagatccccagtggcagacattttagtgatagcccagatccccggtggcaggcattttagtgacctcccagatccctggtggcaggcattttagtgatagcccaagtcccccgtggcagacattttagtgacctcccagtaagcggtggcaggcattttagcgacctcccagatccccggtggcaggcattttagtgatagcccagatcctcgacggcaggcattttagtgacctcccagatccccggtggcaggcattttagtgacctaccaggtccccggtggcaggcattttagtgatagcccaagtcccccgtggcagacattttagtgacctcccagtaagcggtggcaggcattttagcgacctcccagatccccggtggcaggcattttagtgatagcccagatcctcgacggcaggcattttagtgacctcccagatccccggtggcaggcattttagtgacctaccaggtccccggtggcaggcattttagtgacctcccaggtccccggtggcaggcattttagtgatagcccagatacccggtggcaggcattttagtgatagcccaagtaccccgtggcagacattttagtgacctcccagtacccggtggcaggcattttagtgatagcccaggtccccggtggtaggcattttagtaaagtctcccagtcccaggcatccatttgagccattagtccgggaacgtggcatgtatgttagctatctttccaggtccctgaccggtagtctaaccacctgtaagggacagacattttaaattttggctccaggacccagcagacattttagttattcctccgttatgcggcaggcattttaactatcggttcgggactacgcaggcattttaccttcatctccgcatagctggcaagcattttaggaatctttctgctgcttggcaatcactttaaccatctcttccgctgtcccgcaagcacgtagccatcgctccactgtcctgaaagcactttgccactgtcccactgtcccgcaagcacttagccacctctcccctgtcccgcaagcacttagccatcgccccactgtcctgcaagcacttagccatcgccccactatcccgcaagaatttcagccacctctccaccaccccaacaaggacttcgggcacctctccaccgtcccgcaggcactttaggcatctgccctctccttagcccgcatctcacccaccgctccgctctggccacctgtctagctggctatcacgctcttcttccatcacgcgcttgccgcagccgcctcccgggagtggatgcaggactcaagatgcgtggatatctcggaaagtgagaacagagcaagggcgccgagcgcaagtgtgtagcgcttgcaggtacttttgggaccgagtggagcacgacgtagcgcctcaccggatcttgcgagattgcgcctgacacaagcgctgcactgagggtttgagggagtgtggggcgggacctaaggctcttgaggcgcgggatcctgctgagagggtgtggttagcacacttgaccacctgcgcagagaagagggggcagagcttaggggaacagagcatggaccttgtgggagtcacagaaaagaatggctgcaacctgagcccatttgcctttgagagctgggaaagctaggccagcaggtagcagcttgcctggtcgaatggcccttggtgagtgttggaatgctggaaacccagagaccaaagctgccaggctcagctccaacacagtctcatttgtttggtttgtggcagactgcctgcaccccaaccctttcctccccagtcttgcctcctcctgccccctctcttaaactcttacggtctcaaagactgggtttgagggaaacctactgtaatggattgatatacttctccttcaattgacaagagacttaatgtcctagagaaaaattttccttaaactgtacatatccaaatttcaaaaaatgtataacagtcagtatcaatgcaaactgagcaatctgcctaggtacctataaacacacaagatacctataaacacacaagatacctataaacacacaagatacctataaacacacctagatacctataagcacacaagaagcttatagagcaccaattagactggaacagaaaagaaaatcctcctgccacataataacccaattttcttttcaaagaattttttaaaaatatttttattttatgtgtgtgggtgtgtgcagagcccatagaggccggatgagagcatcagatctccctgcagctggaggtacaggcgtctgtgagctggtactcgagtgtttgggaatcgaacctgggtcctctgcaaatgcagccactgctcttagccactgtaccatcattttaaccccaatgtcaattttcagtccccaaagctttgctggtatgtgatacaaattttataaaagtagaaaatgaggagaacttctttgcaaagaaataggatgtagcccaagggaggaaacaaaaaaccctctgagtgaaaaaggcagattcttcaagtaaaatgaatacaaaaatccccaagaatgtgatattttggcaaaagccctctataccatccaggtctgaaatattaaaagaattagagcctttcaccaggtggtggcggcgcacgcctttaatcccagcactcaggaggcagaggcaggcagatttctgagttcgaggccggcctggtctacaaagcgagttccaggacagccagggctatatagagaaaccctgtctcgaaaaacaaaaacaaaaacaaaccaaaaaaaccaacaaaacaaaacaaacaaacaaaaaagaattctagcatctttcacatacaaaagaaagtaccgaggaaaagctggaatggagctctttcatgttcttcctt

SEQ ID NO: 11 - DNA, 5880 bp, Mus musculus
gcacacttgaccacctgcgcagagaagagggggcagagcttaggggaacagagcatggaccttgtgggagtcacagaaaagaatggctgcaacctgagcccatttgcctttgagagctgggaaagctaggccagcaggtagcagcttgcctggtcgaatggcccttggtgagtgttggaatgctggaaacccagagaccaaagctgccaggctcagctccaacacagtctcatttgtttggtttgtggcagactgcctgcaccccaaccctttcctccccagtcttgcctcctcctgccccctctcttaaactcttacggtctcaaagactgggtttgagggaaacctactgtaatggattgatatacttctccttcaattgacaagagacttaatgtcctagagaaaaattttccttaaactgtacatatccaaatttcaaaaaatgtataacagtcagtatcaatgcaaactgagcaatctgcctaggtacctataaacacacaagatacctataaacacacaagatacctataaacacacaagatacctataaacacacctagatacctataagcacacaagaagcttatagagcaccaattagactggaacagaaaagaaaatcctcctgccacataataacccaattttcttttcaaagaattttttaaaaatatttttattttatgtgtgtgggtgtgtgcagagcccatagaggccggatgagagcatcagatctccctgcagctggaggtacaggcgtctgtgagctggtactcgagtgtttgggaatcgaacctgggtcctctgcaaatgcagccactgctcttagccactgtaccatcattttaaccccaatgtcaattttcagtccccaaagctttgctggtatgtgatacaaattttataaaagtagaaaatgaggagaacttctttgcaaagaaataggatgtagcccaagggaggaaacaaaaaaccctctgagtgaaaaaggcagattcttcaagtaaaatgaatacaaaaatccccaagaatgtgatattttggcaaaagccctctataccatccaggtctgaaatattaaaagaattagagcctttcaccaggtggtggcggcgcacgcctttaatcccagcactcaggaggcagaggcaggcagatttctgagttcgaggccggcctggtctacaaagcgagttccaggacagccagggctatatagagaaaccctgtctcgaaaaacaaaaacaaaaacaaaccaaaaaaaccaacaaaacaaaacaaacaaacaaaaaagaattctagcatctttcacatacaaaagaaagtaccgaggaaaagctggaatggagctctttcatgttcttccttgagttctttgaactgaaacaaatgatggaaaatggcttctccccagaagccatcaattctcagtagaaattcaagaagcccattcatgaaaattcatggaaggccacaggaagctgcacccaagctaatcacctacctttgccaagtatactgaaatagctccatgttcttagtatgtctactgttccgtgtgcttggcacaggtctgtaattgcagcacttgggtgtatgtggtagagagagacgtttcaggtgttcagggttatcctctttggcgatatagtgagtttgaggccaggctaggatgcatgagaccctttaattcctgcacttgggaggcagaggcaggaggatctctgactttgagaccagtctgatgtacagaacaagttctaggacagtcagggctacatagagacaacaatctgtctcgaaaacaaccataaaacaattgtgtgtgtaaaattattaaattattgagctttctaggaatttaaagctttaacagtgagatactttgcttttaaatatcaatgcccaattcattcatatttcttcaaatgaacgaaaatgaccagtatgcatatgttgttactggaatgcattctttttttacctttagaagatagaaagtaatactccaaaatatttaataaaatattttaaagatggatgctactagtgattagtattataagtagttgttaactgataacattgattacctaacaaaagttgactgtgagaagatagcatttctaggatgtacaggagaaaacatactgatttctagaaactatcaccaaattttaaaaataatatttttattaattctttgagaatttggcatgtgtactatatcacccccattcctttctctaaccccttgcagatccaccacctgccaccctctctcaacttaatctcctcattaaaaaaaaattacccacagtgtccaatttgtgctgcacgtgaatgcctggatgtgaaccatccactggggtggtgtgcctaccaaggagtcaaaaaaccgtgactgtccctctcccaaaagctctcaactctaaatagtgcttccttatgcttggaatggcgattaacacaagcttattcaggcagctacagttcacaagtacagcagttaatgtcctgtcctgaaggttttgttttgctctggtccggctttgcctatacatcacaaagtctgtttcttcttctgccatggtcactggtccttggggagaggggactgcttttgaaaatgaaggtcatgaatcgacttcaggaggcccattgaacttgtgaaacgttgtgctcaatatttgccctgtatatgctttgcagagaaagttttcttgatgctgagaatcattggtgtcagagataaatccacagtctgtaaactgttgactgtagctctctccttacttagcatatgggggatgtggttattaaatgttttattgtatgcttttcctattttgttttttggagtaatttttggcaggaaaaaaagtaataaaatgaagagtttgaagttgaaaaatataaaacagcaaccaaagggaaatactcactttagaaatgagtacattcaaatatacctgagaaatcattacattaaaactatataaagtaaagccaagtggtgatgatgcacacctttaatcccagcacttgagaggcaaaggcagaagcagagaggcagagagaggcagatgcatctctgagaattcaaggccagcctggtctacaatgcaagttccaggacagccagggctgttgcattcggaaaccctgtctcaaaacaaaacaaaacaaaacgactaaccagtcaacaatagataacaacatcatgccctgtataaaatacctacaagttaatgttaaaacacaagtcaatagagtaggggaaaggcagtgtgcatgtggggagtactcatatgtccaacaaaagtaaaaatttgccagaatcaggtgtttgtttgagggaggggaatctcaggaagcttgggatatcttgttcaactcatgctcctgcctccaccattcaagtgctagcagtataagccttcttttttatttatttatttatttatttatttatttatttttattagatattttctttatatacatttcaaatgctatcccgaaagttccctataccctccctccgccctccacccctacccacccactcctgcttcttggccctggcattcccctctactggggcatataaagtttagtataagccttcaataacaaacatgttcggccccagaatccccatattcaaagctctgtaatgtagcaaaaagtccacaagatggcgatagagacaaggtgctaggttaagtagaagaggaagttcaaggccctcttttccgcagggaaagtttgtgaaatttttcctggtccttgctctagctctgtctggtggaatgtaacaacgttggaggaagcagtttcttttttcgggaaggagaaagatctagggatatcacgctcattactttctacacttatctgaacgctatctggagtcagaaatcaaatagctgagcgcatttggatagcagtgatcaaaactctggaaagagaaagtatactgcaggggaacagcgggctgctaagtaggtgtaggtagtccctgctgaataaactaaagtagccaacgacttgaaaagaaatagagagatctgcagagaatttaagaggtttaaaaggcactgtgtacacatgtgctgattttggaacttcctacaaagctgcacgaatcaaaagtacatggaggggttggagagatggctcagcagttcaaagcactgactgctcttctgaaggtcctgagttcaaatcccaacaacaacatggtgactcacaaccacttgtaatgagatcggatgccctcttctggtgtgatctgaagacagctacagtgtacttagatataataaataaataaatctttaaaaacagaagtacatggaggtggatttgaaggtcagcagctcatattgctgatggagtttacttggagtagagtggaaaatgtggacataactgtgagtctgtgttctgattgttgcctcccagaagatcaactcagggcattaatgattgatccacttacatgaacttcctcaggcagacatttaaaaattaattatagtgttgttatctaggttatgacaacatagtcaaagccagcaaaagggatgctttgaggtgacgataggggaagatagctttgaaattttgtttctacgcattctgggggaactacaaagtcatctatgtgcccattactcaagtcatattcaggagaaagggggggtggaaaaggttgaagtccttaatctgattgtaaccagcttctaggttcacaaaggcagtaaggtgaaggacaggacaacattgaaaactgcctgcttgccgggcagtggtggactttaatcccagcacttgggaggcagagacaagtggatttctgagttcgaggccagcctggtctacagagtgagttccaggacagtcagggctatacagagaagtctcatctcaaaaaaaaaaaacaaaacaaaaaaaaacaaaacaaaaacaaacaaacaaacaaacaaacagaaaactgccttctgggtattaaaagtgtgtttcaacgaacatagagcccatctggagagatagctttgtctcccttctttttgaagtttcttttttatgtgttttggtaattaccagcatgtgtaccacctgcatggctagtaatgtggaggccagatgcttgagtcagatcccctggggctggagttacagacagctgtgagctgccatgtgggtgctggaaacagaacctaagtccttcataagatcagccagtgctcttagccactgagccatctcttcagcccctttgtatcacatctttaaggaaattctgtcaagtctagaaaacagacccccatggccacacacaacaaagaatgcggattttataaaaatttacacctcaaattccaatatgcaaacacacttcaagtaaatgagcaatgggcgtgtgagaaatctttggtatgggacaagcccacacagggtgtccttgcaaggacattctataggtctcagaactgagccttcgttatgctgctggaagccatctttatctagctccgttgagtgagagtttgcttgggaacagacctggtgataattatgtaacaggcagaaactggctgaaggtgctgtagcaagtgacacaaataaacttgttcattcttggaggaggggagcagtggggtcaaaactctgagaaagaaaggacaatctatttcccaagtggcaagattataaaattcaacctgtcacagtgacaaccaaaaatgacctggtaaacaaataggaatttaagatttgtacataagaaaaatagagccttcctgctcataatgtagatgtgcagcttggccttcatgtggatcctgaactactggaacactggaa

SEQ ID NO: 12 - DNA, 1563 bp, Mus musculus
actttaatccaaacgcgtacaatcagaaaaccccactaaagcggaggtagaatcccattggtttttagcataatcacatggcgggaaaattgttaccaaaaaaaaaaaaaaagagcaaaaatcttacctgaaaaagacacgtgcggtgaggtagtattgctgaatttggcttgagcaatattaaaatattaagactattccaaagagtttttcggacacgaggctttccctgatgtgagtgtgtggattctagaccctgctacaagtcacgcccttaactttcttttccgctctagactgcagtttattacccacgccaggcttattgaacgctttgcatatctacctgtaacattttagccaaccatctctacgctatcccagacattttcatcacctctgctctgcccagcagacattttagtcgacctctaggggttggttataaggcagggattttagcgatctccccaggtccctggcggcggcaggcattttagtgatagcccaggtccccggtggcaggcattttagcgatagcccaggtccccggtggcaggcattttagcgatcttccagatccccagtggcagacattttagtgatagcccaggtccccggtggcaggcattttagtgatagcccaggtccccggtggcaggcattttagcgatcttccagatccccagtggcagacattttagtgatagcccaggtccccggtggcaggcattttagtgatagcccaggtccccggtggcaggcattttagcgatcttccagatccccagtggcagacattttagtgatagcccagatccccggtggcaggcattttagtgacctcccagatccctggtggcaggcattttagtgatagcccaagtcccccgtggcagacattttagtgacctcccagtaagcggtggcaggcattttagcgacctcccagatccccggtggcaggcattttagtgatagcccagatcctcgacggcaggcattttagtgacctcccagatccccggtggcaggcattttagtgacctaccaggtccccggtggcaggcattttagtgatagcccaagtcccccgtggcagacattttagtgacctcccagtaagcggtggcaggcattttagcgacctcccagatccccggtggcaggcattttagtgatagcccagatcctcgacggcaggcattttagtgacctcccagatccccggtggcaggcattttagtgacctaccaggtccccggtggcaggcattttagtgacctcccaggtccccggtggcaggcattttagtgatagcccagatacccggtggcaggcattttagtgatagcccaagtaccccgtggcagacattttagtgacctcccagtacccggtggcaggcattttagtgatagcccaggtccccggtggtaggcattttagtaaagtctcccagtcccaggcatccatttgagccattagtccgggaacgtggcatgtatgttagctatctttccaggtccctgaccggtagtctaaccacctgtaagggacaga

SEQ ID NO: 13 - DNA, 34 bp, Artificial Sequence
  synthetic
  misc_feature (6)..(7): n is a, c, g, or t
gtgaynncccagrtccccggtggcaggcatttta

SEQ ID NO: 14 - DNA, 68 bp, Artificial Sequence
  synthetic
  misc_feature (6)..(7): n is a, c, g, or t
  misc_feature (40)..(41): n is a, c, g, or t
gtgaynncccagrtccccggtggcaggcattttagtgaynncccagrtccccggtggcaggcatttta

SEQ ID NO: 15 - DNA, 19999 bp, Mus musculus
tgtctcaaaacaaaacaaaacaaaacgactaaccagtcaacaatagataacaacatcatgccctgtataaaatacctacaagttaatgttaaaacacaagtcaatagagtaggggaaaggcagtgtgcatgtggggagtactcatatgtccaacaaaagtaaaaatttgccagaatcaggtgtttgtttgagggaggggaatctcaggaagcttgggatatcttgttcaactcatgctcctgcctccaccattcaagtgctagcagtataagccttcttttttatttatttatttatttatttatttatttatttttattagatattttctttatatacatttcaaatgctatcccgaaagttccctataccctccctccgccctccacccctacccacccactcctgcttcttggccctggcattcccctctactggggcatataaagtttagtataagccttcaataacaaacatgttcggccccagaatccccatattcaaagctctgtaatgtagcaaaaagtccacaagatggcgatagagacaaggtgctaggttaagtagaagaggaagttcaaggccctcttttccgcagggaaagtttgtgaaatttttcctggtccttgctctagctctgtctggtggaatgtaacaacgttggaggaagcagtttcttttttcgggaaggagaaagatctagggatatcacgctcattactttctacacttatctgaacgctatctggagtcagaaatcaaatagctgagcgcatttggatagcagtgatcaaaactctggaaagagaaagtatactgcaggggaacagcgggctgctaagtaggtgtaggtagtccctgctgaataaactaaagtagccaacgacttgaaaagaaatagagagatctgcagagaatttaagaggtttaaaaggcactgtgtacacatgtgctgattttggaacttcctacaaagctgcacgaatcaaaagtacatggaggggttggagagatggctcagcagttcaaagcactgactgctcttctgaaggtcctgagttcaaatcccaacaacaacatggtgactcacaaccacttgtaatgagatcggatgccctcttctggtgtgatctgaagacagctacagtgtacttagatataataaataaataaatctttaaaaacagaagtacatggaggtggatttgaaggtcagcagctcatattgctgatggagtttacttggagtagagtggaaaatgtggacataactgtgagtctgtgttctgattgttgcctcccagaagatcaactcagggcattaatgattgatccacttacatgaacttcctcaggcagacatttaaaaattaattatagtgttgttatctaggttatgacaacatagtcaaagccagcaaaagggatgctttgaggtgacgataggggaagatagctttgaaattttgtttctacgcattctgggggaactacaaagtcatctatgtgcccattactcaagtcatattcaggagaaagggggggtggaaaaggttgaagtccttaatctgattgtaaccagcttctaggttcacaaaggcagtaaggtgaaggacaggacaacattgaaaactgcctgcttgccgggcagtggtggactttaatcccagcacttgggaggcagagacaagtggatttctgagttcgaggccagcctggtctacagagtgagttccaggacagtcagggctatacagagaagtctcatctcaaaaaaaaaaaacaaaacaaaaaaaaacaaaacaaaaacaaacaaacaaacaaacaaacagaaaactgccttctgggtattaaaagtgtgtttcaacgaacatagagcccatctggagagatagctttgtctcccttctttttgaagtttcttttttatgtgttttggtaattaccagcatgtgtaccacctgcatggctagtaatgtggaggccagatgcttgagtcagatcccctggggctggagttacagacagctgtgagctgccatgtgggtgctggaaacagaacctaagtccttcataagatcagccagtgctcttagccactgagccatctcttcagcccctttgtatcacatctttaaggaaattctgtcaagtctagaaaacagacccccatggccacacacaacaaagaatgcggattttataaaaatttacacctcaaattccaatatgcaaacacacttcaagtaaatgagcaatgggcgtgtgagaaatctttggtatgggacaagcccacacagggtgtccttgcaaggacattctataggtctcagaactgagccttcgttatgctgctggaagccatctttatctagctccgttgagtgagagtttgcttgggaacagacctggtgataattatgtaacaggcagaaactggctgaaggtgctgtagcaagtgacacaaataaacttgttcattcttggaggaggggagcagtggggtcaaaactctgagaaagaaaggacaatctatttcccaagtggcaagattataaaattcaacctgtcacagtgacaaccaaaaatgacctggtaaacaaataggaatttaagatttgtacataagaaaaatagagccttcctgctcataatgtagatgtgcagcttggccttcatgtggatcctgaactactggaacactggaacgggggctatcacaaaagctgttgcctgtccatgggatttgttctcctagctgagttgcctggtgggcctcagtaggagaggatgcacatatcctcacagaaacttgatgtgtcagggtgggaggatacccaggggccctcaccagctcagagaagaatgggagggagaaggaagaaggatcatgggagggggggacctggagttgggggcagtgagcaggatgtaaagtgaataagcaaaaaaaaaaaaaaaaaattgtctcctggagccaggcgtggtggcgcacgcctttaatcccagcacttgggaggcagaggcaggcagatttctgagttcgaggccagcctggtctacagagtgagttccaggacagccagggctaaacagagaaaccctgtctcgaaaaacaaaaaaataaaacaaaacaaaattgtctcctggaaatccagaagaccagacagaagatagtcaaccaaagaaaagacttgagtgatactgtaatctgactgtataacacagaacaatacaaaggcataacagtaggaaagcaagcttctcattgtaggctcggtcttcagggaagactgtatcctagggcaaaaaccaagtgtttcctcgggatgtgctaaacctggtgctggcccagtatcctctgcaatgatagaattctacctagactgctccatttttcagccagcctctattcagctagactccagaaaaacaagttcagtgtttggtgttttgctatttggtcactaggtggcagtataagcccaggtttgtgctacagacttaaagccataaaaaggagcttggttggtcatatttttacaaatacaaatatttgtagtaccttggatgactttagatggatgcagtcctctgcagtgatctatactatagtttatatgtaactccaattaaaggcatttcaaatcagactggattagcatggatacatttttgggctgttagctccgttctattttgtttacatatgtttcttttttcactcttagggaaactcattccaacagtcccacagcttcttgtcagaggtcctcgataaatattaaaaggttgaattgaaacacagcaagttgtaacacatcacacacatgtatacatatatacatgtatacagcaaccatatgctagctcatagcacatggtagcccgcaaccctctataatggcatctgattctctctttcattgtccatgaagacagagaacacatatagattgagtaaataaacaagtaaataaatgatctttatacacatacctctagggaaaacaatatgaatatagctctcataaattctccaaaaacaaatttaaaaataaaaaaagaacttaaccacatagaattatactagaaataaaagcaaaaagatatagggaaaattcacaaatgcatcgaaatacaatttgcctaaacatccaaagaatgaaagaagggaaattataaaatatgaagatggataaaagcatctcaaagtagcagcagaccagaagttgtagcatggagtaatagttgtaataggaaatttatacttgtaaatactgacataaaagaaacattaaaaagacagttaaaaaaaatgggtgctgtaaatctgaccaagaacccacaacttggacactcaaagacccttggggtgatagtggtggaccatccattattattttgcttatcagacacatcgtctaactcctctctaaatacagacctccaacgggagaggctggctcagtggttgagagcactggctgcttgctcttccagagcacctgaatgcaattcctagcaaccacatggtggctcaaagcacatggtggcccacaaccatctacaatgggatctaatttcctctttcattgtccatgaagacagagaacacatatacattaagtaaataaagaaacgaacaaataaatgatcttttaaatgaatacttctagacccatggattagggtagctctcagacctccccagagacacttctttgtgtagtgaccagggctttgatgtggtcaaaatggagagaatagtatctgtagagtgtgaagggtgctcagttctaaatggagcatctatatcacacagttacatgcaaacctcagagaaaatcacttaagacaggggccatctgggctgggggttaagcagcagtgacaggaccggtgctcaggagctcacagcagctgtgattccaatactaggggaggtactcgatctaccgctgaggagccattgggagttaatggtgtggccctctgatagatccatcaacctgcaatggatgaccccatctccatgcatatatggttggttggcacaaacgggacccagtgtgttatttaaaaacaaaaacaccattaaaaaaaccaccacaccaggccaaagccatatttttagcatcacaaaaaaaattgaataaaatgaacaatttcttcgactctatcagggaaataacattccccaaattacaaagtctcttagagagagcagcgacttgctgatgagtgagaaaacagctcctgtccacagacagtgtgaacacaggaaaacaaactgacgctttcttggaaggtttgtttgaataaatttaataataagataatccaggctatatccagcgagcaatacacttttgtgacttttcttcataggagccctagagcatgttttttagtgaaaatgatctccatagggattggaacagaaagagaaaaggaagcattctgaaacacccccatagcagtctgctctcctagcttcagcctcagacaaacgtgactcattagaaattcaagtaactgagtcccttaatccccaggctgacatgcaactcctgagctcgaacattgccccaccttagctttcataagactcaaaccgacctgaagggagggaaaaaaaagcccaattctagcccaccacgcttctgcttaaccgacgggaaggaaaactgtacaagacccaagaagaatcgctgtgatgaccacagttgagtggcatagatacagctaatgaacaccctgccaccatcaaggcctcctgtaatatcagagaaatacaataacgtgtcatacaactcagaactaattcaagaagtctctagagcaaccaaagcaacaaattaggaaaaataaagacacttggaacattctccaacctgggatccctctggctgtatcaaacagtggacacatggtatagccctcattttcaaccacatcaaacactgtatgtaaagcttactaaaacaaaaaaatctcagctagaaaatacagatcagaaccaaattcaggcgtggtagacatctgcaaggattagatggtacatctaattatgattaacatggtaaaagtgctaaaacaaaacaaaacggtagactggttttgacccccggacaagggacagaagtgcttattttacatatcaatgcagacctggcttccaggttctactagcagcgttcagtccctgcctgatataccttgttcccaaccttgaactttccagttcaggggcttagctgcccttccacaagacgttctttccaatgttatctagacattttgcgccccacccttctcctctctgcacgagcgcaccccttcttcccttttctcctctcccctctccccatggcaactcctcaatccttgaagccagtgaactccccgagagcagttccccaataagcctacctttaatgcaatcggacttgaatagtctcgtttcacgggcagagaagtcattgatcggagacaacatgcatgaataggagaccaacaccatcaacacaaccgatgctcaaaatcaatagcattaagaagtgagcattcataaagatttggaagctaacacttcagagcacactccagaagaacaaatggggtgtgaggggaagggatttagttagggattttgcttgtcattggcggtgcatctctgcaatcccccaaatctggaaggctgaggaggatcagaagctcaaaggctgcctggaatgcgtggggagaatctccctctaccaataaagagacaaacaatgccagacaagcagaatgtatcaggagacaactggaaatgggataaagatacaagataatacctaaaacctaatggaatgaatgaagctaaagccgcacaaaggtgtgtgtattggggggtggggggagttacagatgcgcattcctaaggaaggaatctctgagtcaccaccacctgcaggaaaaccttggcagaaaacagaaatgacaaaggctcgagcgtaaatacaaaattttaaaatgctgtttttcttgaaaaaaaattttttttaagaagctgatgaaactaagctacaccaataacaaactcaaatcacgtttgcaaaaggagaccttacaatcagtcaatgcttaaaatctctcaagagccgaagcagaagggatgctatctaactcaattcatgatgccagagtgatcctgatatcaaagccagaaagagacacaaaagaaagttaaaaatttatagcccacatccctgatgatcatcatcattacaatatccataacccgagtttgatggaattaaaatatccaggtgggatttactcatggaatgcaagaatgattcaacatacaaaaatcaatgaacacgatatcaccacaatacaatgacgatcatcttgatagcattaaaacaaaaacaaacaaacaaacaaacaaacaaacaaaaaaacccacggggctggggagatggctcagcggttaagagcaccaactgctcttctgaaggtcgtgagttcaaatcccagcaaccacatggtggctcacaaccatccataatgagatctgatgccttcttctggtgcatctgaagacagctacagtgtacttacatataacaaataaataaattaaaaaaaaaacacttggaaaaactcagtgtactcatgattaaaaactctcggtaaaccaggaataggaggaaattgtctgagtacataagggccacattgaaaaagcccacagctaacatggtcaatggtgaaaaattgagtgctttccctttaataagatgaaggaaccaagaatgtttgctctcttagattccaatcctaatagaattgatggtcctgtgcagaacagttggggaagaaaaggaatccagggctgggactgtaccacagtctgtagaatgcttttctctagaatgcataaagccctatgtgcaatcccaatagtggtacaagcctatgaccctgatactcaggacgtagaagctagaggatcacaattcaacgttaccctgggctaaagaccctgttttactttattactttttttttttttaatatctgaattgtaactgactggagtactctgctcacaaatgccatgattatttatgtgggggacttacgaaagtctacacacacatacacacacacacacacacacatacacacacaccatacaactcaggtaattcagctgtaaagttataggatacaaaatgagtatataaaagtgaattgagggccactgagatggctgagcaattacaaacacttgcccccaagtttgaagacctgagtttttgtttgatacagccctggctggcttggaaattactatgtagaccaggctggctaccaatttatttaagatctgtctgcctctgcctttgagtcctgggattaaaggtgcaagccactacagcaaacttggtgttatagtttaaatatatggtttactcctagcaacttgtatgttgtcttggtgctgaaatgtggtggcatctttaagagggtttaattaatttctcaagagcctagctgagttcttggattttaagaagaggttgctataaaatgatcctagcatctacctgatagctcttgtgcatatattatactggacaaaatagatgtttccctaccacaactctcctatgagttaacactgcttccaaccagaaactgagaaaatcctggccagcacagtcttgaatgtctctgtttccagaattgtgacctaaatttatctttactattcatgacttaatctaggttgaggaatgttgctataacaaaaaataatctgagataattgctctgactagaacatttaatattgttaaaatactacttctgttcaaagtgatctgtagagtcaatcaatatctatcgcactcccaatgggtttttgtttgttttctttttgtattttggaagtagcaaaaataactataaaatacatatagatgcgtgaagacccatgaacagccaaaataatcctgaaaaagaacagctcttgtccaatggaccttgggggaaaccaaacgtcacattttacacagagcaggataaggtattggttttcattttgcctctccagaacacaaaacctagatttttttgtttgtttgttcatctgttttaatagggcctcatctttagcctgggcttaccttgaatttggagtctgcctccctcagttgctatagttctgggattataggcataaggtgcaatttccagcaaaaatcctttaagggctgcttgaaactcactatgtagctcagcctggcctcaaactcataaccatcctctcaagtgctaggattacatgaatgagccacagtagcagctaaaaccctttacattttattagggtatattctatacaatatgagtgccattataacatcacatacacgtaagattttgttcctattcactcccattactctctttttttctccctctcacttttactgatccccttactctgctcacacacttctgatttctggtttcttctatagcatggatgaagggttatttacaggaacatggcagattcttaccgaagaaagtatccccccctcccaactccctcagcaaacaataactactaataccccttctgcagggaggaatgaggcatcttggtcccttacgtctagacactgttaactgcctcctcggggagggatgaggccttgtgagcctcttgtagcaactgttaacttcctacacatcctaaggaatgtgggggtccccttgtatacacaggccttgggtagggtaatcataggtgctgtgagtttatgagtatgactgctgctgtatgttccacaataccccatcccttcttccagctttacctttctgccctctttgctgtggtgtttcttgaaccttgcaagggaggagatgcagatcccattagggctgatcttcaacaatcacacaatcacatattcttttttgtttgtttgtttgtttgtttgtttttttgagatagggtttctctgtgtagctctggctgtcctggaactcactctgtagaccaggctggcctcgaactcagaaatctgcctgcctctgcctcccgagtgctgggattaaaggcacgcccagccaatcacatattcttatgactcagagctaaaagtctgcacgaacagaaactagtcttaccaaagctgacagtagcacaaatctacaggtataaacatacatggttagaagacaatttgatagtcataaggtggccagctagggaggcaatagtggtaaagcttctccattagagcctatggtctccccagctagaggcttttgacaaggcatgaactttctcctagcaagtgagcctcaactccaatcagaaagttaattagccaaataaaaaaaatggtaccctgtgctcagcttggcctgtgagtaaatctgtgggacattttctcggttaacgatcgactgggggggggggcagtccacttaaaccatgtgggtggagccacccatggacaggtggtcctgggaggtatgaaaaagcaaagtgagcaagccatggggagcaagccaggaagctgtcctttgtggttcctgccctaatttctactgtgatgtggaagtacaagccagataaacctttcctacccaatgtatttttggttagaatgttttatcacagtaatagaaagcaaactaaaaactaaaacatctttctaactttcatgccacagtttctttttcttcctttcttttttcttttctttcttttcttttcttttttttttttttttttttggtttttcgagacagggtttctctgtatagccctggctgtcctggaactcactctgtagaccaggctggcctcgaactcagaaatccacctgcctctgcctcccaagtgctgggattaaaggcatgcgccaccactgcccggctgcatttttttttttaaattaaaaaagttgaacctaggtgtgttgtctcgtgcctgtaatgcccatgttcaggagagagagagagggagggcagggtgattactatgacttcaacatcagcatgcgcttacatcatcagttagaggccagtctgggatacagagtgagaacctgtctcaaaacaaaaacaaaaaaacaaaaaacaaaacaaaacatcaactatcataagtgacttaaataatggatattaaacctaaatatcacacaacttcacttaagaaaattctgaggactggaaagatggctcaatgattcaaagtgctttccggaggaagcctgaacaccacagtttgagtcctaacacttttatataataagctaagtgtgggcccatgcatccctataagtccagcactgaggctagcagagactggaggattaacaaggcaaacaggcagacacggtaacagcctcttcatgcatgcactagctcacacacatgagtgcgcgtacatcacaaacacaagcacacacaataaatacatttaaaagttttttctttctttgtaagtgtgaaaattacaaattgtagaattttgatccagataagaggatcaggagtttgaggctagcctgggctacataagaccctgtttcaaaaaccaaactaaaccaaaacacacacacacacacaaagttgacacaaattttcaccatgtattcgacgtgtcaaggctcacctgggtcatgcaagactaaataaattaattgtaactaaatgcaagactaaatgtctaaagtatttttgaaagtctggcttaatgcaatttgcttcggtgttttgtcagatgacaagttagataggtcattcatgcttgtttacgaacaagacaagtaaaattcctcgagtctctgtctcttggaataggtctttccactgtaggtgggagggaaatgtttccgtctcccaagtgctggaatttaaaggtgtgggtctggttgaactcgttttttgtgtccttcagtggtcaggtgccccggctggtgggtggggtgggaggaggagtatctgtctctattgttcctggactgatcctgaagtgtaacggaagtgaaaggaaggttgagtggagggctagtggacagtgactggcccacaacactacctttaagaagacaaatggaccatagtgatgtacacctataatcctagcacccaagaggcagaggcaggaggatcactgagttcaaaaccgtcctgatctacagagagagagagttcaaggacaaccagggctatacagagaaaccctgtctctgggggggaaaaaaagcaaggaaaaaaggaaggaaggaaagaaagaaagaaatgaagagaaagaaaaaagactaataggtcccagagactcccatgacagtgggaaagaagagtctgcacacttcctcctgctggaattcttgataagaaataacctccagagaaatggcaatcatttacaatttataccacaaattatactacactggaacaccatagtaggccttaggagaaaaacagacgcttaaacatccctacttggaggctttttgaaaacaaagtaaattatctttactgagcaagaaaacacttggtgtctaggtaaccctgtagcatgtgtgaacaaaagactattgcccagacagagcctcaactttctcctttctattaaattcacagtaaaaagcaaacatgtatagacataagtaataaagtcaggtgtaggcataaatcaccgcatcttttctacaaaagtgagcttaagcgttttacctttttaggacagagtgaaaatccggaagttgtcttctgattgtaacatgctgccacggtcctccctgtcactgctgccattgggctatggcctggtgtctgtactcaaactgaaaacttgcaagctagcacacgtgctggcggagtgtggacgcacgggtacacgtgcgcacgcatgaacacacacacatgcacacacgcgtgcgcacagacacacacacacacacacacacacacacacacacacacacacacacacacattttgcgcatgcgtacagatatgtgcgtgcgcacacacatacaggcacacgcacacatgcaagcgaataaaattaaaatatggtaggcgcatggtagaacatgcctttgatcccagcatttggaggcagaagcaggcagaactctgaatttaaatccaatctggtctaaaatatgagttccagttcatccaggaccacgacaaaaagaccctgtctcaaaaacacaaatcacaaaatggcaaaatgaaacaaaacaaaatgaaaaccaaataaaatagaaataagaattctaccttcagctgagtgtgtgtttgtgttatatatgaatattgtgatgaatatctgtaatcccagaactgaggactttgagacagaagaattaggagtttgaagccagcctggaaaagatggccagattatgactgtttttctaaataataagtaaagaaataaagaaaaggagaataacaaccaagcatggtgataaattcgtgacctcatcttctatgtatatgatgtaaaagtcatgaagtaataacctcttacaatattcaagtagtagctttacttggaaagaaagattttaaaagaaattttatttttagacagtcaaaaatataattaagaagtatcgtatctgtgctaagcagacaatataaaattcgggaacaaagaacatatatctttatctgtttgcttatttttatttatttatttatttacttacttacttacttacttacctacttattggagacacatttttttctatgtaacagccctcactattctggaactctccctgtagaccaggctggcctcgaactcacagagatttgcctgcctctgcctcccaagtgctgggattgaaggcctgtgccatcactgcctggcactttttctttctgtctctgtctctgtctctgtctgtatctcttccttcctttctgtctctttcttttttatctttagtatttttaaaggcatgtttttatctgctagctatttatttttgaggtagagtctcacgatacagcctcaactagcctggaactcagaaagagccatcttcctccccccaccacacctggcaggttccttttaaagacattacttctcaactcaaataatgctaaaatcaattgagctgtttatcatctgactattgttggttagctagaaacttctgaagtgttgcaatgtttagctaaagtctagaatttgctgtttttccatgtgttaagtgtcaggaaatgcgaggtaggtaagtgtttgaagatagtgtctgccattatacaaaatgctgagtgataggctgattgagtgtacaaccaaacagatccagatagtcaccaacttatttattagttgctggactggtttttaccaaactatgaggaaaagtaggagggataaaaaagagtaatagaggggtgaatatgcaattatgttatatgcattatggaaatagttaatgaaatctttactttgtacaaatagtatacactaattaaaaagatacaaatagctgatatgcaagataaataagttttacagatctaatgtatacatagcacaggcactacagttaatgatactgtgttagatcctttttaaagaaaactctagttttgctgagcgtggtggcacacgcctttaatcccagcacttgggaggcagaggcaggcagatttctgagttcgaggccagcctggtctacaaagtgagttccaggacagccagggctacacagagaaaccctgtctcgaaaaaacaaaacaaaacaaagagtactgactgctcttctagaggtcctgagtccaattcccagcacctacatggtggcttacaaccatctataattccagttcttaggggacattgacaccttcttctggcttctgtggacactgcacagatatggtacctaggtatggcagccaaaacacccaagcacataaaataaagataaataaatatttttaaaaagggggatgggggtggacagatggctcagcggttaagagcattgactgctcttccagaggacctgaattcaattcccagcaaccacacaaccatctgtaatgggatctaatgccttcttctggtgtgtctgaagacagctacagtgtactcaggaaaaaaatagtttttttttttttaagaaagaaattcagatatctgctgtattgtactctttattactgccaggacaaaatgtccagaacgataattcaaaaatagcccactgactttccacgtgctagaaggtagaaagtgatagcagatttcatgccatgcagatgatccctgtttccacagaggtgcttctctcacaagacagaagaaatggaagagcaaaagacacaaccaggagtgtacttttagctgttcttacaaggacagggacagtaatcgagtcatggaggcattaccaaatacatccaaaaaggccttatctttcttgttgtttttgttcggttggttttggttttgaggcaaggtttttcggtgtagttctggctatcctggaattctggagtcaggctgacctcgaactcacaaagatcctcctgactctacctcctgagtggtaggacaaaagccgtgcaccatctgatcaccctactcatgatgtgtgcatgcacacacactaataataacaagcaaaaaatatctttaaaaagtctaaaaccacaactttgagacagacattaggtagacatacttattccaaaagtcagaaataggaaagaagaaagggataaattacgccaaataagccccagacatggcagggcaagagttcgttctgtgtgcgcacgtgctccaaagtgtttcattacagttgctttcagagtcctgggtgaggggattatttgtaggagaatggactccctacaagtagttacacactcagatcttctctccctttctcaccaactatagaccccccagggaggggtggggtaacatcagctcctcccaataggggaaggttttgttggtgttgtgttgtgttgtgttgtgttgtgttgtttgagacagtctatcactatgtagcctgattggcctggaattcatcaggtagaccaggctggcatctaaatcagagattcacctgcctctgtattttgactgctgggattaaaggtatgtacaccaacatattcccctaagaggggatggatcccagggtctagatgccattgctctctctcccctctctctttataaatatagttttaagatttttacttgtatttatcagtacagggggtgggttgctggagtatgccagaagagagtattggatcgcttggagctagagttacagggaattttgagacatctggggactgaatataagtcccctgaggagcagcaccccaacatggtaatacttcatcttaaggctcaagagcaaactttggctccaagttctgcctctagacacacggagcgccatttgggttcacagggctctaagcttgcctcgctaggcacgctgacacagcacttcttgtcagtcggaaccagttgctggcacctctcccaagctgtttttgcatactggtggctctatagctctggcgtcataactgagagcagtgttttcatagctcttttgggcattgctctcattgggggtctattctctgggcaaaagtcgctaagcactgtgctggtagagactttatatcagccttcctctggttctctgcttggctctcaaaactcatggaggaatcctttgaaatctaggtgaagctagtcatgactccacagctcatacgtttggaggcagcagttccttgctaaattctactttgtgtgcattaatgtctcctaagcaagtctagtagaaaatcctttataatatcaattgtagtacttcaagtttcttccgcatcacggcatcggctgagtaacagtcccccagatagatggaacaatagaagattacaaagtgagaaaaggaaggaagtagaaaaactggtgtttacttggttccagctgttttctgattcaggaagaaaggggccgggcatactctacccatttatagtaagaagatttttttgttttggtgggtttttcgagacagggtttctctgtgtatccctggctgtcctggaactcactttgtagaccaggctggcctcgaactcagaaatctgcctgcctctgcctcccgagtgctgggattaaaggcatgcgccaccatgccaccacgcccggcttgtagtaaggagatttaactgtaccatgtaaggcaagagctcctcatgtcagagttcaaaaagtaaatgtgctgaaccatcacttggtttagaacagcttaagcccccagcccccactccaccccaaaccaacccttgactgtttaattgctgataaggaataaaagccctttcctataaaccactgtttgtttgtttgcaacgaaatcagagatttactatatggatatttaaaaattcagaatttgggggctagagagatggcttagaggttaagagcactggctgctcttccagaggtccagagaacccagtttcaattaccaacaaccacatacagatcacagctgtctgtaacttcagctctaagggatcctataccatcacacagatatggatgcaggcaaaaaagcatcaatgcacatggaataaaaataaataaaatttttaaaatttggaatttacaaataatgaagatccctcactggttcagccactcaccgaggtacctcactccagcaatttcccctcaccagacttattcatttttaaagtttagatgtttgaatatttattgtaaaacagcaagcacaatgatttctatttttataattggtgacgtgatctggaaaaatacttctaattggtaaggcaagagtgattgcaatgcactcttcatttttttctaacttcttaaagtatcttcttttttaaaattaaaactttattataggggctggagagatggctcagtggttaagagcactgactgctcttccagaggtcctgagttcaattcccaggaacctcatagtggctcacaaccatctgtaatgagatctgatgccctcttctggtgtgtctgaagacagctacagtgtacttagatataataaataaatctttaaaaaaaacctttactggaaggagttacagagacaaagtttggagctgatacaaaaggatggaacatctagagactgccatatccagggatccatcccataatcagcctccaaacgctgacaccattgcatacactagcaagattttgctagaaggaccctgatatagctgtctctagtgagacttcgcctgggcctagcaaacatataagtggatgctcacagtcagctattggatggtcacagggcctccaatggaggagctaaagaaagtacccaaggagctaaagggatctgcaaccctataggtggaacaacaatatgaactaaccagtaccccccagagctcgtgactctagctgcatatgtatcaaaagatggcctagtcggccatcactggaaagagaggcccattggacatgcaaactttatatgccccagtacaggggaacgccagggccaaaaagtgggagtggggggaagggtatgggggactttttggatagcattggaaatgtaaatgaggaaaatacctaattaaaaaaaaaaacggggcctagcaaacacagaagtggatgatcacagttagctattggatgggtcacacggcccccaatggaggagctagagaaattacccaaggagctaaagggaactgcaaccctatagatggaacaacattatgaactaaccactaccccggagctcttgactctagctgcatatgtatcaaaagatggcctagtcggccatcactgcaaagagaggcccattggacttgcaaactgtatatgccccagtacaggggaaccccagggccaaaacgggggagtgggtgggtagtggattggggggggtgggtatggcggacttttgggatagcattgaaaataaaaaaaaacctttactataaaaaaacttgcaaataaaaaattacccaccggagctaatgaccagatctttaatagttttgttttttatattgttatagtgtttgtgttctcagcacacttaacaaaagcaacagaaaatataagaaattaatctactcaactaaactaattaaagtttattttgagacaggatctcactatgtagtcctgaactggaactcactatgagcagctggcttttaatttaaagacccacaggtttttgcctcttttgcctctggagtgctgggattaaaggcatgagccagcagcatcccagactacattttaagaaagggaaaaaagctggtcgccgggcatggtggcgcacgccttaatcccagcactcgggaggcagaggcaggtgaatttctgagttcgaggccagcctggtctacaaagtgagttccaggacagccagggctacacagagaagccttgtctctaaaaaccaactaaccaaccaaaccaaaaccaaaccaaaccaaaaaggaaaggaaaggaaaaaacgaggtaattagcataattagcatgacaaggaaggggtagtgagaaacagtgacacagaaacgcaaaggtttcaagcagaatttattggaagtttggcaagcaacaaacaccctagttggcctgtagatgactttagattgttttgcggtgattttcattttgaagaaggatttccaattttcaaaacagccaggctcaaattaagtatttcccatttattttagcagtttggtatagatttgttttcggcttagtgtgtagagatgtttgtttgtttgtttgtttgtctgttttccatcaggacttcatttatgcatgagggcacaatggtagctgatggtgacacgtttctgcctgcctgcttaatcagtt

SEQ ID NO: 16 - DNA, 5564 bp, Mus musculus
ttcctcgggatgtgctaaacctggtgctggcccagtatcctctgcaatgatagaattctacctagactgctccatttttcagccagcctctattcagctagactccagaaaaacaagttcagtgtttggtgttttgctatttggtcactaggtggcagtataagcccaggtttgtgctacagacttaaagccataaaaaggagcttggttggtcatatttttacaaatacaaatatttgtagtaccttggatgactttagatggatgcagtcctctgcagtgatctatactatagtttatatgtaactccaattaaaggcatttcaaatcagactggattagcatggatacatttttgggctgttagctccgttctattttgtttacatatgtttcttttttcactcttagggaaactcattccaacagtcccacagcttcttgtcagaggtcctcgataaatattaaaaggttgaattgaaacacagcaagttgtaacacatcacacacatgtatacatatatacatgtatacagcaaccatatgctagctcatagcacatggtagcccgcaaccctctataatggcatctgattctctctttcattgtccatgaagacagagaacacatatagattgagtaaataaacaagtaaataaatgatctttatacacatacctctagggaaaacaatatgaatatagctctcataaattctcaaaaacaaatttaaaaataaaaaaagaacttaaccacatagaattatactagaaataaaagcaaaaagatatagggaaaattcacaaatgcatcgaaatacaatttgcctaaacatccaaagaatgaaagaagggaaattataaaatatgaagatggataaaagcatctcaaagtagcagcagaccagaagttgtagcatggagtaatagttgtaataggaaatttatacttgtaaatactgacataaaagaaacattaaaaagacagttaaaaaaaatgggtgctgtaaatctgaccaagaacccacaacttggacactcaaagacccttggggtgatagtggtggaccatccattattattttgcttatcagacacatcgtctaactcctctctaaatacagacctccaacgggagaggctggctcagtggttgagagcactggctgcttgctcttccagagcacctgaatgcaattcctagcaaccacatggtggctcaaagcacatggtggcccacaaccatctacaatgggatctaatttcctctttcattgtccatgaagacagagaacacatatacattaagtaaataaagaaacgaacaaataaatgatcttttaaatgaatacttctagacccatggattagggtagctctcagacctccccagagacacttctttgtgtagtgaccagggctttgatgtggtcaaaatggagagaatagtatctgtagagtgtgaagggtgctcagttctaaatggagcatctatatcacacagttacatgcaaacctcagagaaaatcacttaagacaggggccatctgggctgggggttaagcagcagtgacaggaccggtgctcaggagctcacagcagctgtgattccaatactaggggaggtactcgatctaccgctgaggagccattgggagttaatggtgtggccctctgatagatccatcaacctgcaatggatgaccccatctccatgcatatatggttggttggcacaaacgggacccagtgtgttattaaaaaacaaaaacaccattaaaaaaaccaccacaccaggccaaagccatcatttttagcatcacaaaaaaaattgaataaaatgaacaatttcttcgactctatcagggaaataacattccccaaattacaaagtctcttagagagagcagcgacttgctgatgagtgagaaaacagctcctgtccacagacagtgtgaacacaggaaaacaaactgacgctttcttggaaggtttgtttgaataaatttaataataagataatccaggctatatccagcgagcaatacacttttgtgacttttcttcataggagccctagagcatgttttttagtgaaaatgatctccatagggattggaacagaaagagaaaaggaagcattctgaaacacccccatagcagtctgctctcctagcttcagcctcagacaaacgtgactcattagaaattcaagtaactgagtcccttaatccccaggctgacatgcaactcctgagctcgaacattgccccaccttagctttcataagactcaaaccgacctgaagggagggaaaaaaaagcccaattctagcccaccacgcttctgcttaaccgacgggaaggaaaactgtacaagacccaagaagaatcgctgtgatgaccacagttgagtggcatagatacagctaatgaacaccctgccaccatcaaggcctcctgtaatatcagagaaatacaataacgtgtcatacaactcagaactaattcaagaagtctctagagcaaccaaagcaacaaattaggaaaaataaagacacttggaacattctccaacctgggatccctctggctgtatcaaacagtggacacatggtatagccctcattttcaaccacatcaaacactgtatgtaaagcttactaaaacaaaaaaatctcagctagaaaatacagatcagaaccaaattcaggcgtggtagacatctgcaaggattagatggtacatctaattatgattaacatggtaaaagtgctaaaacaaaacaaaacggtagactggttttgacccccggacaagggacagaagtgcttattttacatatcaatgcagacctggcttccaggttctactagcagcgttcagtccctgcctgatataccttgttcccaaccttgaactttccagttcaggggcttagctgcccttccacaagacgttctttccaatgttatctagacattttgcgccccacccttctcctctctgcacgagcgcaccccttcttcccttttctcctctcccctctccccatggcaactcctcaatccttgaagccagtgaactccccgagagcagttccccaataagcctacctttaatgcaatcggacttgaatagtctcgtttcacgggcagagaagtcattgatcggagacaacatgcatgaataggagaccaacaccatcaacacaaccgatgctcaaaatcaatagcattaagaagtgagcattcataaagatttggaagctaacacttcagagcacactccagaagaacaaatggggtgtgaggggaagggatttagttagggattttgcttgtcattggcggtgcatctctgcaatcccccaaatctggaaggctgaggaggatcagaagctcaaaggctgcctggaatgcgtggggagaatctccctctaccaataaagagacaaacaatgccagacaagcagaatgtatcaggagacaactggaaatgggataaagatacaagataatacctaaaacctaatggaatgaatgaagctaaagccgcacaaaggtgtgtgtattggggggtggggggagttacagatgcgcattcctaaggaaggaatctctgagtcaccaccacctgcaggaaaaccttggcagaaaacagaaatgacaaaggctcgagcgtaaatacaaaattttaaaatgctgtttttcttgaaaaaaaattttttttaagaagctgatgaaactaagctacaccaataacaaactcaaatcacgtttgcaaaaggagaccttacaatcagtcaatgcttaaaatctctcaagagccgaagcagaagggatgctatctaactcaattcatgatgccagagtgatcctgatatcaaagccagaaagagacacaaaagaaagttaaaaatttatagcccacatccctgatgatcatcatcattacaatatccataacccgagtttgatggaattaaaatatccaggtgggatttactcatggaatgcaagaatgattcaacatacaaaaatcaatgaacacgatatcaccacaatacaatgacgatcatcttgatagcattaaaacaaaaacaaacaaacaaacaaacaaacaaacaaaaaaacccacggggctggggagatggctcagcggttaagagcaccaactgctcttctgaaggtcgtgagttcaaatcccagcaaccacatggtggctcacaaccatccataatgagatctgatgccttcttctggtgcatctgaagacagctacagtgtacttacatataacaaataaataaattaaaaaaaaaacacttggaaaaactcagtgtactcatgattaaaaactctcggtaaaccaggaataggaggaaattgtctgagtacataagggccacattgaaaaagcccacagctaacatggtcaatggtgaaaaattgagtgctttccctttaataagatgaaggaaccaagaatgtttgctctcttagattccaatcctaatagaattgatggtcctgtgcagaacagttggggaagaaaaggaatccagggctgggactgtaccacagtctgtagaatgcttttctctagaatgcataaagccctatgtgcaatcccaatagtggtacaagcctatgaccctgatactcaggacgtagaagctagaggatcacaattcaacgttaccctgggctaaagaccctgttttactttattactttttttttttttaatatctgaattgtaactgactggagtactctgctcacaaatgccatgattatttatgtgggggacttacgaaagtctacacacacatacacacacacacacacacacatacacacacaccatacaactcaggtaattcagctgtaaagttataggatacaaaatgagtatataaaagtgaattgagggccactgagatggctgagcaattacaaacacttgcccccaagtttgaagacctgagtttttgtttgatacagccctggctggcttggaaattactatgtagaccaggctggctaccaatttatttaagatctgtctgcctctgcctttgagtcctgggattaaaggtgcaagccactacagcaaacttggtgttatagtttaaatatatggtttactcctagcaacttgtatgttgtcttggtgctgaaatgtggtggcatctttaagagggtttaattaatttctcaagagcctagctgagttcttggattttaagaagaggttgctataaaatgatcctagcatctacctgatagctcttgtgcatatattatactggacaaaatagatgtttccctaccacaactctcctatgagttaacactgcttccaaccagaaactgagaaaatcctggccagcacagtcttgaatgtctctgtttccagaattgtgacctaaatttatctttactattcatgacttaatctaggttgaggaatgttgctataacaaaaaataatctgagataattgctctgactagaacatttaatattgttaaaatactacttctgttcaaagtgatct

SEQ ID NO: 17 - DNA, 1223 bp, Mus musculus
aaatacaataacgtgtcatacaactcagaactaattcaagaagtctctagagcaaccaaagcaacaaattaggaaaaataaagacacttggaacattctccaacctgggatccctctggctgtatcaaacagtggacacatggtatagccctcattttcaaccacatcaaacactgtatgtaaagcttactaaaacaaaaaaatctcagctagaaaatacagatcagaaccaaattcaggcgtggtagacatctgcaaggattagatggtacatctaattatgattaacatggtaaaagtgctaaaacaaaacaaaacggtagactggttttgacccccggacaagggacagaagtgcttattttacatatcaatgcagacctggcttccaggttctactagcagcgttcagtccctgcctgatataccttgttcccaaccttgaactttccagttcaggggcttagctgcccttccacaagacgttctttccaatgttatctagacattttgcgccccacccttctcctctctgcacgagcgcaccccttcttcccttttctcctctcccctctccccatggcaactcctcaatccttgaagccagtgaactccccgagagcagttccccaataagcctacctttaatgcaatcggacttgaatagtctcgtttcacgggcagagaagtcattgatcggagacaacatgcatgaataggagaccaacaccatcaacacaaccgatgctcaaaatcaatagcattaagaagtgagcattcataaagatttggaagctaacacttcagagcacactccagaagaacaaatggggtgtgaggggaagggatttagttagggattttgcttgtcattggcggtgcatctctgcaatcccccaaatctggaaggctgaggaggatcagaagctcaaaggctgcctggaatgcgtggggagaatctccctctaccaataaagagacaaacaatgccagacaagcagaatgtatcaggagacaactggaaatgggataaagatacaagataatacctaaaacctaatggaatgaatgaagctaaagccgcacaaaggtgtgtgtattggggggtggggggagttacagatgcgcattcctaaggaaggaatctctgagtcaccaccacctgcaggaaaaccttggcagaaaacagaaatgacaaaggctcgagcgtaaatacaaaattt

SEQ ID NO: 18 - DNA, 10890 bp, Mus musculus
agtatgcttgcttgcttgctttttaactgtcagaaagagcaaattctgtataccagaaggccaaggggacaaaccttctgggcttggcaagtacaactgggagatctaaaggtctgtacagtcagttgggaggaagagccaacctcttcagtaagatctcggtaactgtttcaacttaagaagaccaataccagaactggaggcactatgggtcacctccatagcccagtgaaaggaagagcaaggaacaggtagatctctccccaccaacgtatatgtatgcatatacagacagccatgaactagatcacagacattttcttagcttttcatcctagctggggggagactaggcaccagcatagttttcaattttcagtggtgatgtgacagaatattcactgggcctttagggtactacagaaggctgtcattctctcatcatacatccctacctgcaccctcttgatccacatccccacctccagcccaattcacagcccaccttatatgctgcatgagtagtgctaggaaatctaacggtctgggcctgtccctggaaaggaaagccagggtcagaagtgaggtcttggcacccgtagaaggcataaagaagtctgttataaaacccagtgattgggagaacatagggacaattcaacccctcaatattaactgggtcccagacattttcttcacagttccaacctaactgaaagagaacttagacaccagtattttctaggctctccaaccacaacgaaccttcaggatgtgacagagatgtgactttttctattcttaccccactagaacccctgtgctaccctccccctcccccagctccaccctcctatctccctctactgcaccctagtcccacttcgtgtttctcaagcactacttcaaaatcaaatggtaaggtaagtcaaggttagcttaggtgccttggcttcattctgtttggtttagttctgtttgttttaggaagacaatcaatatccccaataaggttttaagatctttataaagaagagatgcccagtacttgatctagtggaagaaggactatagatgcaaatctccacaccccaacaacaatgaccaaaaagtcctgttttcttagcttttccaatctaggtgagggagagtgtacatcagtgttttcagggtcctccgaccaatgtgagtcttcggatactttagaggcttgacattctctagtcctataccccccacctggccccttcacacacacttgacgtgctcctccccaccaccgtcgccacacttggagaagagtggtctgtgttgtaggtttgggaggatagccaagctagtaccggacccaacgaagatccagtccctctcctccctaacattaactagatcacagatatttgttttgtgtatccatcctagatgatagagaatctaggagccagtattttctaagtgttccaatgtggatggaacattatgatactacaaagatcagattttctctcttcctagactcccaacctcccccatactaacctcccctactcctctcccagatgaccctaagcctatcttctgggctccataattactgctgggaaatctaaatgaggactgtacagggtctctgaaaaagagagtcgtgctccaaagtgaggtcttctatctttataaataaggcagtccactacctggcccaatataaggaaaagcacagaaatggctgcacaaaatagcaaccaaaggacagtgtggtagtgcactcctttaatgacagtactaggggaggccagaagcaggctagtggatctctgtgagttggggacaatctgatatatataacgaatttgggtccagcagaactacatactgagactttgtgtcaagaaaacattctctagagcacagccatttcttgtgcttctagggtagttgaagaaagaacaatgccactcgctgttctctagtatcatccctcagagagcagccatgagcctttagcctgctgccacaaaggtgtgacagtctcttctaacgtcgaactgccccaactccagcacaccacctcactttctggccccccagacctgtgcaccaccacgcaccatgccctgtcgttcattcccccaccttaagtactccacaaggactgtttgaaagtctggtgctcattacagatccactggaaaatcgagtccagttgtgcagtgagttcttgctggctttgtaaggtaggaggtctcaatatttaatgcatccaaaggaagaacatagggcagcccacctccaaggctttaaactagatcagacattttacttgctgcttcccatagagccgcaacctaagcagcgagtgtgtttgttctaagccctctaatgaggaagcacatttagggtaggtactaccaaagtgtgctactttctagttcgtgtcccacctctctgcccatcaccatcttaccccacataaccccatagcttctgccacgagccccacctgtcatggcgctggttccagcctcatgcccacccccaccatctgtgctccttgaatactgctgggaactaacagtctgtgcctgttgatagataaagtcaagctctgggaatgccagtgtctgacacactgaaaggaagggtataagaatggctcctacagcccagccttcgctcagatactgttaagcttttccaccccagcagagagaaaagtcagactccagtttttttccatgcccttagaggataggggtataaagtacaatgacattctcttatactacagttctgcagaactccctgcctgctcctggcccatttcctcacctctaggtctcacctcccatctactggttcccaaccactgtccccttcctacaccactgcctgctgatcccacccaccctcctattctatacaagtgctggaaactggaagggtagattgggaaggacaagctccatggttggaagatctaatacctgatcagtaaaaagaagtacacaggacctactccttcatgccaatactcactagatcacagagatttccttaatacttttaccctagctgaaggaaaatgtagaggtcaatgttttcttaagacctccatggaagataggcatttaggatactacagaggtgtgtcattctctggttctacccattcccaatacccgagggtctccagattccgccccctcaacttgaccccaccccagcacgagctgtgataaaaacttgaagctctggcccaagccctcaggcctttattcacagcacccacctagacttgggtatcagctccaccaacaaggtctccctccacagaagccgaatcccggagctatgtctgaaaagcaaagccccaagacctctgaagcagaatgcagtgcaatggacttgccagaattcgaggatgaagaaaactggcttttcaaaggtaaaaacctacttacttttttatagttaccggaaagaggaaagtgactcctctgggcacgagtccagggacactgtttctttcaaattccccaggagcaaaggggaaaccatctcctgtctccccagggttttcatttctcatgccacctctcccttgatatctaagtaatatcatcctaggatccttagttttctccaaagctgtcaaactaaaccagagattccctttaactggaggcaaccagaatgacacagacggttgcgaatgaattaaatcagtgttagttaaccatgtggacctggaggtggtagactgttggaaaggattgtcttttatagattagaatgttccagtatgagcctgcagttaccatcttctttctacgttctcctcgaatgtgggttatctggtattgctcctaaatcaaactgaaggacctactcaagaacaacaaaaaacttataaactaagacatttaacatatacgttggattcattttcagggctcccaatagaggagctagagaaagtacccaaggagctaaagggatctgcaaccctataggtggaacaacaatatgaactaaccagtaccccccagagctcgtgactctagctgcatatgtatcaaaggatggcctagtcggccatcactggaaagagaggcccattggacaggcaaactttatatgccccagtacacgggaacgccagggccaaaaagggggagtgggtgggtaggggagtgggggggggagggtatgggggacttttgggatagcattggaaatgtaattgaggaaaatatgtaataaaaaatatataaaaaaaaataaaagaaagtacgcgggaagccgggcagtggaggtgcgtgcccttaatctcagtactcaggaggcagaggcaggtggatctctaaattcaaggccatcttggtctacagagtgagttccaagagagccaggactacacagagaaactctgcattgagaaaaacaaaacaaaacaagaaacagaaagtgagctagatatggtagcatatacatttaatgctagccccttggaaggcataggtatggaaacctctttaactctgaggctagcctgttctacatagagaactccaggccaggtagggctatatacagtgagaccctacctccaaacaaacaaaatatcaataaagttgtttaagcttcctccataacagcccataaaatctatatattcttgctcctatacctcctaaaacatggaatacatgtgaggatattttcaaagtgctttgacttctaacacattaaacacaagttttatttgcatttgagtctgtgtatgttttaatcctcagtttgcctttttattctctcttgtttctttcgcagttctgggattccagcctgggccgtcctctgctctgggcaagtattgcaccttggaaccccacccccaacccccaccttgatatttttgcttctgttgttgttgtcattttggtttttatttatgtgttgacagtctaggtctttaaaaaccaaaaacaaaaaataaaccaaaaccaaaacccaacagttaagccttcatgggaatgaactcagcagctcgggttctctcctttagtgctggagtgggcccggtctgaagaggaactcaggtacctttttgttctgcatccccctttaagctcattttccttcacccatttcaagaacctaatgtgtttgaaaaagtgctaaataatgctgaagggatctttttccaagtttacttacaaatagtcaaaacaataaatgaaaatactatttttttggtatgtgtaaatacaaaatttaaaacactaaaaaaggtagtaaacgacaacttttatttttttttccttttatattcttgcttgtttaaagggtccaatctccaactaactattccacaggttgtaaacaaaaaaatctctgtggtatttagcttcaacaatatcattgagcaggtagcagtctcctgcacccagcagtttaagctcaagaggcctttgatcccaacccctcctttctaccaccctttgcttcctagctgcactttcacatttgatttttcatgatcacagatgatgacaccgacgatcaggcagatgagccactgaggtaagttgtgcaacactttcttcacatcagcaatggtcacctttggtgtcagcagctgatttccacccaagtgaacaagaaatacatcttgcatgaccttgccacacaatttgatgctcagcacagaaatgtacacttccatgagacatcctagagcagtagccgggaatctatgacgctccccccccccaaaaaaagaaaagagcctttagtcttcttgtggattgaaactggtaagttgctgtgagttttttaaaaaagtgttactgcagtaagactaaaaaattttctttggacttttatttcccacagtgttctgaaacccttgttatgaacatggtagatatcaatttctcttttgtactcagttttcatgggggatgttcccaaggccagaagcattctagttgctaagactagtgaatgaggcacagtgtcccagagaactgataatggaactcccagaaactctaggagaaaatgtagcctatttgtttcatgaaaacagagggtaggaacacaagcacagccacacctacttgtagaatcttggtctagactgccttgaaaagcacacattctccactgtggatgatccagggcccaaattgcaatatagttaaatcatttagggactactgttaggaacaaatctgtttctgttaaaaatattgggaatcgccgggtgatggtggtgcatgcctttaatcccagcactcaggaggcagaggcaggcagatttctgagttcgagaccagcctggtctacaaagtgagttccaggacagccagggctatacagagaaaccctgtctccaaaaaaaaaaaaaaaaaaataaaagaatattgggaatcaaaattaggctggtgattgtgacctgaacaaaaaacaaaccgggcgtggtggcgcacgcctttaatcccagcacttgggaggcagagacaggcggatttctgagttcgaggccagcctggtctacaaagtgagttccaggacagccaagaccatacagagaaaccctgtctcgaaaaaccaaaaaccaaacaaacaaacaaaaaacaagaacaaacttgataaaattccaaaactgaagcttttaaaaggaaagtgtttggggaacaaaatacatatatcaagtaagccagtagaagtgcaacaaagttatagtcaaaaaacagattcacctcactatttcagttctttaatctatacaatgaaaaggttactctaggtgacacgcttcagcttttagattttgttcaaggcatttttctgaagtaaatcatagttattcaatcatttatttggcccctgattttactttaagcaacagattagtatgtcggtttctgaattgcatgtagtctgtcattgagataaatgactctccagtgtatttattattatgacatttttctctagcgctgccgaatttcttcacctgcaagatattcttcaggaggacagagtcagcagtaccgatgatgaggacacttgccaagctgtaagttggtccaagggaagacagaaacacaccaaggtgggagctctgaaaaacacaaatgttcaaggggtggataagactctaaacatgatgcaatagatatggtactaggataatgataatgataatgataatgataatgataatgataatgataatgataatgatgtccactgaaaactgaatcacgctaagattgtatttaattgatggtcaattgtttcccagaagatcccctatagttaggagttataagagcttgtgagcagctgggtgtggtggcgcatgccctttaatcccagcactcgggaggcagaggcaggcagatttctgagttcgaggccagcctggtctacagagtgagttcccaggacagccagggctacacagagaaaccctgtctcaaaaaaacaaaaacagaaacaaacaaacaaaaaacaaaaacaaaaagagcttgtgagctagttgtacaatgtgggtgatggaaattaagctcaggccttctggaatagcagtgagaactactaagtgctctgctaactctccagcccatagtgcatccattttcgaaagcctcactttaaaagtttccaaacaaatctgggggagaggggagctcatggggctgggctgggggtggagaactaggaggactggaaggaggggaaatgcagtcagaatgttatgtatgcgagaagagctttttaaaaatccaaacaaactgataatgtgtttaattatatacccccaaaattttccttggtagtatataccatgaataaactaaagtgtaactgcacacgtagcaagtttattcttggccgaattattgaagcacagtatacagaaagagcggtgacagttctaccttattgtgtgtcattcagcttctggcgcactgtgtatttttagtatcattttctaaagtgtgtgtctgtgaaaaggtattttagcccataaaaagtgtttttaaaagccagatgtggtgccttgaatgtgtgatcctagaatgtctatggtgaggtgagaggcagagacagaatggtctggaaggttgtaggccagttagcctgaactacgcagcatggcagaaataagacttaccctgtcccagagaaggtagaaggtgagagccaatctctctctctctctctctctctctctctctgtccctctccctctttctctctctcttacacacacacacacacacacacacacactttaaaatttgaacaagacacagcatcaatacagccttgtgtgcttagacacaccgcatagagttttagcactatgccttggggtggaggttgccagcaaaaggaatgtaaatgtggaaattgtgatattagatgaacaatgtagaggatgtgtgcttaaagtttgagagctgaaaccaggtgacaaattgttcacctctctgtgcgtgtctgaaatgaccaaaaggcaattaaaatatttgcaaatttgctaatatagaatacatgaaaattgaggatttacttccaaagtaaagattctttccaagtagctgctatttgcctaccctgaagccaggacactagccctggggagctaaggtgaatgagacctagacagatataatcctctccactcctccttctttccttatttatttctgaaacaaggtctcactgtacaactcactctgtagactaggctggccctcaaactcacagagatctggttgcctctgcctcctgagggctggtgggattaaaaactgggcttcgagccctcagtcctgcctctacctcatcagtactgggactgcagatgtgtactgccacattcagatttccttttgggattttgaaagaaagaaaataaatgtgagcagtaataaaagccaattgaggattatagtcagcaaccaaagccactaaaatattctagaaccaagtcaaacttcttcagggtatctggtgctttcattaatgtgagcaatctaccattataagaacactgtacccaaggcccattttctcaaaacttatcaaggtatctacactaatgatcttgatgtgggagagaagcagtagtccataaggtacaactgtttactaagctttgtcccaactttattctcatcagttaagactatcaactctagggttaacattaagacaaaagtcctcctttgacagccaaaaattatctacttcaattttgactttcccctgtgtctttatcactccatagggatgtactgaagatgatgaaaccagtcacagtgacagagacatagacaataatgtgaaagtcatcactggcaacattaaagcaagcccctccatgtatatgtatgtattctcaattgttcttgggttatgggaaatccagggaggagaaatacaataggagttggttatccattaactgtgcttagtcttatccttggtatcagttgagaagcaacgtaggaagatgatgaagtctgtaatgacatagtgttgtagtgatctggtctgtagttccacacatcagttgcaatatgctgctgttcctttatgggatagattgtttttgtctactctgttttgtgtgtaccttttctcacagatgattttggtatgaaattatgtaggattttgtttttgtgggcctggctctcatttttgtaggaagtcagagagttcaaagagtaaaagagaccctaagtctatttgtattcatgtgactgctcttgagtacaagcaatgtcctagagaagaactttcatgctctgtcctttcagtactgtcatttgtcatgtgctagtggaggcttacatttttcttcttttttttcctttttccttttattggatattttctttatttacatttcaaatgttatatcccctttccacatctcccccccgaaaccctttatcccatcctccctcccctgcttctatgaggatgttcctccacccacccacccacccactcccaccttcccaccctcaattcccctacactggggcatctatcaagctttcataggaccaagcgcccctcctcccattgatgcatgacaaggccatcctctgcaatgtatgcagctggagccatgtgtactctttgttgatgacttagtccctgggagctcttggggttggttcatattgttcttcctgtggggttgcaaaccccttcaacttcttcagtcctttctttagctcctccattggggaccctgtgcttagtccaatagttggcttcaagcatccatctctgtatttgtcaggctctggcagggggaggctcacatttgatgtcttttttcctttaaaatggaaaaatagtcaggtaagatagtgcacacctttcattctagcacttgggaggcagaagcaggagttctaggccaacttgctccacatagtagcttccatttgcctctgcctcccagactgctggtgggataaaggctggccttgagctctccatcaccgtctctacctcaccacattgccacttccagatttctttttgagagctacgtagagcatgatttacatagtggcttctaggctggttaggactatatagtaagagcctgtctaaagaaggtgggggtagatagcctgtcttagttcaaatataaatgggtcatattttcatgtgtgtgcatgaatgattttcatgtctctctaagttgttggatttagcctattgacaattgattacactatatattctagggagatgttcactgatcagaacccacaagctgaccaagacctggaagaaactgaatcaggtatctttcttgccctttggattgttatt

SEQ ID NO: 19 - DNA, 9196 bp, Mus musculus
ccagggatcctagcaaaccctcttctgacattggtgcccaacaggcatacacatgattcacaaacatgcaaacaagcagaacactcatacacgtaaaatctaaaataataataaagtagacctatagagtatatataattccaaatggatttcagtagaagaccctacttacattgcacagaaaaagctgtctggctgcttcaggcatgccaatatcagcacatgtaaacaagcttccaactttgtttttgagtaatcaactcattattcaccagatctgaggctatttctattcaacagcacaagaaaagaagggagaagcaggaggatctctgtgagtttgaggccagcctggtctacagagctagttccaagacaccagggctgttacatagagaaatgctgtctcaaaaatgaacacacacacacacacacacacacacacacacacacacacaagcgcaagaaagaaaccattcgaatttgactgcatatgtacataaaacctttaaataaaagacgtaatttcaaatcaaatgaggtcttaagaatggagcctaaacctgtctgtctctttaccagacgcagggcagccagaaggcagccattcacaatccaggaagacaggaagggataacaccagaacccaacctccattttagagaggtctagcctcttgagctatgacacactatttgttctctaactacccaaagttgtattttactatgctaattagctgattaagacattaggtaaaggtgttctacaaagaaactgtaaataaaagacatactctgtgccttagcctatctcatgattccttttctggatgtcttcataaccaccttaacctctacgaagatacagagacacaggtagcactacagtgctgtatttgtttaagcccccaacaaacttggtggcttaaagcaacacagatctataaccttataattttagaagtcagaagttcagtgtgagacacctagttgaaattgaaattattatttgaaattaaattgaaattattccttctgtaagttttagagaattcatttccctgccctttttagcttcaaatttcttagctagtaattgccttcctctatgtctatagccggatgtagagtctttgtcaatcttttatccctgccatttcaatgaaacaacaccttaccttctaggggaatctttttatctcaaggtcgattgattagaaacctcagtttcttcctccaatgtaatatagtatattagtatattctggggagtcagtgtttgtctgcctactaacacaggtaagaatttgcataggtattacaaaatcagtactttgcaaatctttcttctcttccgaattgaaaactgaacattaatccaaacatggcggcagaagcctttaaaatcggcactgtcccactgaaggcagtggcaggcagagctttgcgagtttgaggttatttactgagaccttgtctcagaaataaggcattaaaaaaaaaacaaaaaacaaaattcaccccaaatccgcatcaaaaccaaagctgattgttaatttccctcctttctaaactggattcattccttagtgccattgtttgctcgtctgaacacactgaataaacactaccgggagggattttccgtgcctatagtaaataagaatatgatttttcagatacgaaccactgagaattgttttgccttgcccgccacccccaccccgaaaatactccttgtcccagatagtagaaacttaatgggttttcaaagcactcagattattttcgaatttcaacgataccagagatcgggtcattatgtacctcggaaataaacggaacgcagtaccaaaattttaggtctcaacttccaaggcttctcaaagaaagttatcgcagacttagttactcgttcttggttacttcacacgctaccagtaatttttccacttttctgaatctgtgccccccccccacattctttcatcaactttaatccaaacgcgtacaatcagaaaaccccactaaagcggaggtagaatcccattggtttttagcataatcacatggcgggaaaattgttaccaaaaaaaaaaaaaaagagcaaaaatcttacctgaaaaagacacgtgcggtgaggtagtattgctgaatttggcttgagcaatattaaaatattaagactattccaaagagtttttcggacacgaggctttccctgatgtgagtgtgtggattctagaccctgctacaagtcacgcccttaactttcttttccgctctagactgcagtttattacccacgccaggcttattgaacgctttgcatatctacctgtaacattttagccaaccatctctacgctatcccagacattttcatcacctctgctctgcccagcagacattttagtcgacctctaggggttggttataaggcagggattttagcgatctccccaggtccctggcggcggcaggcattttagtgatagcccaggtccccggtggcaggcattttagcgatagcccaggtccccggtggcaggcattttagcgatcttccagatccccagtggcagacattttagtgatagcccaggtccccggtggcaggcattttagtgatagcccaggtccccggtggcaggcattttagcgatcttccagatccccagtggcagacattttagtgatagcccaggtccccggtggcaggcattttagtgatagcccaggtccccggtggcaggcattttagcgatcttccagatccccagtggcagacattttagtgatagcccagatccccggtggcaggcattttagtgacctcccagatccctggtggcaggcattttagtgatagcccaagtcccccgtggcagacattttagtgacctcccagtaagcggtggcaggcattttagcgacctcccagatccccggtggcaggcattttagtgatagcccagatcctcgacggcaggcattttagtgacctcccagatccccggtggcaggcattttagtgacctaccaggtccccggtggcaggcattttagtgatagcccaagtcccccgtggcagacattttagtgacctcccagtaagcggtggcaggcattttagcgacctcccagatccccggtggcaggcattttagtgatagcccagatcctcgacggcaggcattttagtgacctcccagatccccggtggcaggcattttagtgacctaccaggtccccggtggcaggcattttagtgacctcccaggtccccggtggcaggcattttagtgatagcccagatacccggtggcaggcattttagtgatagcccaagtaccccgtggcagacattttagtgacctcccagtacccggtggcaggcattttagtgatagcccaggtccccggtggtaggcattttagtaaagtctcccagtcccaggcatccatttgagccattagtccgggaacgtggcatgtatgttagctatctttccaggtccctgaccggtagtctaaccacctgtaagggacagacattttaaattttggctccaggacccagcagacattttagttattcctccgttatgcggcaggcattttaactatcggttcgggactacgcaggcattttaccttcatctccgcatagctggcaagcattttaggaatctttctgctgcttggcaatcactttaaccatctcttccgctgtcccgcaagcacgtagccatcgctccactgtcctgaaagcactttgccactgtcccactgtcccgcaagcacttagccacctctcccctgtcccgcaagcacttagccatcgccccactgtcctgcaagcacttagccatcgccccactatcccgcaagaatttcagccacctctccaccaccccaacaaggacttcgggcacctctccaccgtcccgcaggcactttaggcatctgccctctccttagcccgcatctcacccaccgctccgctctggccacctgtctagctggctatcacgctcttcttccatcacgcgcttgccgcagccgcctcccgggagtggatgcaggactcaagatgcgtggatatctcggaaagtgagaacagagcaagggcgccgagcgcaagtgtgtagcgcttgcaggtacttttgggaccgagtggagcacgacgtagcgcctcaccggatcttgcgagattgcgcctgacacaagcgctgcactgagggtttgagggagtgtggggcgggacctaaggctcttgaggcgcgggatcctgctgagagggtgtggttagcacacttgaccacctgcgcagagaagagggggcagagcttaggggaacagagcatggaccttgtgggagtcacagaaaagaatggctgcaacctgagcccatttgcctttgagagctgggaaagctaggccagcaggtagcagcttgcctggtcgaatggcccttggtgagtgttggaatgctggaaacccagagaccaaagctgccaggctcagctccaacacagtctcatttgtttggtttgtggcagactgcctgcaccccaaccctttcctccccagtcttgcctcctcctgccccctctcttaaactcttacggtctcaaagactgggtttgagggaaacctactgtaatggattgatatacttctccttcaattgacaagagacttaatgtcctagagaaaaattttccttaaactgtacatatccaaatttcaaaaaatgtataacagtcagtatcaatgcaaactgagcaatctgcctaggtacctataaacacacaagatacctataaacacacaagatacctataaacacacaagatacctataaacacacctagatacctataagcacacaagaagcttatagagcaccaattagactggaacagaaaagaaaatcctcctgccacataataacccaattttcttttcaaagaattttttaaaaatatttttattttatgtgtgtgggtgtgtgcagagcccatagaggccggatgagagcatcagatctccctgcagctggaggtacaggcgtctgtgagctggtactcgagtgtttgggaatcgaacctgggtcctctgcaaatgcagccactgctcttagccactgtaccatcattttaaccccaatgtcaattttcagtccccaaagctttgctggtatgtgatacaaattttataaaagtagaaaatgaggagaacttctttgcaaagaaataggatgtagcccaagggaggaaacaaaaaaccctctgagtgaaaaaggcagattcttcaagtaaaatgaatacaaaaatccccaagaatgtgatattttggcaaaagccctctataccatccaggtctgaaatattaaaagaattagagcctttcaccaggtggtggcggcgcacgcctttaatcccagcactcaggaggcagaggcaggcagatttctgagttcgaggccggcctggtctacaaagcgagttccaggacagccagggctatatagagaaaccctgtctcgaaaaacaaaaacaaaaacaaaccaaaaaaaccaacaaaacaaaacaaacaaacaaaaaagaattctagcatctttcacatacaaaagaaagtaccgaggaaaagctggaatggagctctttcatgttcttccttgagttctttgaactgaaacaaatgatggaaaatggcttctccccagaagccatcaattctcagtagaaattcaagaagcccattcatgaaaattcatggaaggccacaggaagctgcacccaagctaatcacctacctttgccaagtatactgaaatagctccatgttcttagtatgtctactgttccgtgtgcttggcacaggtctgtaattgcagcacttgggtgtatgtggtagagagagacgtttcaggtgttcagggttatcctctttggcgatatagtgagtttgaggccaggctaggatgcatgagaccctttaattcctgcacttgggaggcagaggcaggaggatctctgactttgagaccagtctgatgtacagaacaagttctaggacagtcagggctacatagagacaacaatctgtctcgaaaacaaccataaaacaattgtgtgtgtaaaattattaaattattgagctttctaggaatttaaagctttaacagtgagatactttgcttttaaatatcaatgcccaattcattcatatttcttcaaatgaacgaaaatgaccagtatgcatatgttgttactggaatgcattctttttttacctttagaagatagaaagtaatactccaaaatatttaataaaatattttaaagatggatgctactagtgattagtattataagtagttgttaactgataacattgattacctaacaaaagttgactgtgagaagatagcatttctaggatgtacaggagaaaacatactgatttctagaaactatcaccaaattttaaaaataatatttttattaattctttgagaatttggcatgtgtactatatcacccccattcctttctctaaccccttgcagatccaccacctgccaccctctctcaacttaatctcctcattaaaaaaaaattacccacagtgtccaatttgtgctgcacgtgaatgcctggatgtgaaccatccactggggtggtgtgcctaccaaggagtcaaaaaaccgtgactgtccctctcccaaaagctctcaactctaaatagtgcttccttatgcttggaatggcgattaacacaagcttattcaggcagctacagttcacaagtacagcagttaatgtcctgtcctgaaggttttgttttgctctggtccggctttgcctatacatcacaaagtctgtttcttcttctgccatggtcactggtccttggggagaggggactgcttttgaaaatgaaggtcatgaatcgacttcaggaggcccattgaacttgtgaaacgttgtgctcaatatttgccctgtatatgctttgcagagaaagttttcttgatgctgagaatcattggtgtcagagataaatccacagtctgtaaactgttgactgtagctctctccttacttagcatatgggggatgtggttattaaatgttttattgtatgcttttcctattttgttttttggagtaatttttggcaggaaaaaaagtaataaaatgaagagtttgaagttgaaaaatataaaacagcaaccaaagggaaatactcactttagaaatgagtacattcaaatatacctgagaaatcattacattaaaactatataaagtaaagccaagtggtgatgatgcacacctttaatcccagcacttgagaggcaaaggcagaagcagagaggcagagagaggcagatgcatctctgagaattcaaggccagcctggtctacaatgcaagttccaggacagccagggctgttgcattcggaaaccctgtctcaaaacaaaacaaaacaaaacgactaaccagtcaacaatagataacaacatcatgccctgtataaaatacctacaagttaatgttaaaacacaagtcaatagagtaggggaaaggcagtgtgcatgtggggagtactcatatgtccaacaaaagtaaaaatttgccagaatcaggtgtttgtttgagggaggggaatctcaggaagcttgggatatcttgttcaactcatgctcctgcctccaccattcaagtgctagcagtataagccttcttttttatttatttatttatttatttatttatttatttttattagatattttctttatatacatttcaaatgctatcccgaaagttccctataccctccctccgccctccacccctacccacccactcctgcttcttggccctggcattcccctctactggggcatataaagtttagtataagccttcaataacaaacatgttcggccccagaatccccatattcaaagctctgtaatgtagcaaaaagtccacaagatggcgatagagacaaggtgctaggttaagtagaagaggaagttcaaggccctcttttccgcagggaaagtttgtgaaatttttcctggtccttgctctagctctgtctggtggaatgtaacaacgttggaggaagcagtttcttttttcgggaaggagaaagatctagggatatcacgctcattactttctacacttatctgaacgctatctggagtcagaaatcaaatagctgagcgcatttggatagcagtgatcaaaactctggaaagagaaagtatactgcaggggaacagcgggctgctaagtaggtgtaggtagtccctgctgaataaactaaagtagccaacgacttgaaaagaaatagagagatctgcagagaatttaagaggtttaaaaggcactgtgtacacatgtgctgattttggaacttcctacaaagctgcacgaatcaaaagtacatggaggggttggagagatggctcagcagttcaaagcactgactgctcttctgaaggtcctgagttcaaatcccaacaacaacatggtgactcacaaccacttgtaatgagatcggatgccctcttctggtgtgatctgaagacagctacagtgtacttagatataataaataaataaatctttaaaaacagaagtacatggaggtggatttgaaggtcagcagctcatattgctgatggagtttacttggagtagagtggaaaatgtggacataactgtgagtctgtgttctgattgttgcctcccagaagatcaactcagggcattaatgattgatccacttacatgaacttcctcaggcagacatttaaaaattaattatagtgttgttatctaggttatgacaacatagtcaaagccagcaaaagggatgctttgaggtgacgataggggaagatagctttgaaattttgtttctacgcattctgggggaactacaaagtcatctatgtgcccattactcaagtcatattcaggagaaagggggggtggaaaaggttgaagtccttaatctgattgtaaccagcttctaggttcacaaaggcagtaaggtgaaggacaggacaacattgaaaactgcctgcttgccgggcagtggtggactttaatcccagcacttgggaggcagagacaagtggatttctgagttcga

SEQ ID NO: 20 - DNA, 22845 bp, Mus musculus
cggcttgctccagccatgtttgctcgtttcccgtggatgtgcggttcttccgtggtttctctccatctaaggagctttgggggaacatttttagttcccctaccaccaagccttatggcttatttaagaaaacatatcaaaattccacgagatttttgacgttttgatatgttctggtaagattttttttttgacatgtcctccatactttttgatatttgtaatattttcagtcaatttttcatttttaaggaatatttctttgttgtgccttttggttgatacttgtgtgtgtatggtggacttacctttctttcattgtttatatattcttgcccatcggggccacggatacctgtgtgtcctccccgccattccatgcccaacggggttttggatacttacctgccttttcattctttttttttcttattatttttttttctaaacttgcccatctgggctgtggatacctgcttttattctttttttcttctccttagcccatcggggccatggatacctgctttttgtaaaaaaaaaaaaaaaaaaaaaaaaacctttctcggtccatcgggacctcggatacctgcgtttagtctttttttcccatgcccaacggggcctcggatacctgctgttattatttttttttctttttcttttgcccatcggggctgtggatacctgctttaaattttttttttcacggcccaacggggcgcttggtggatggaaatatggttttgtgagttattgcactacctggaatatctatgcctcttatttgcgtgtactgttgctgctgatcgtttggtgctgtgtgagtgaacctatggcttagaaaaacgactttgctcttaaactgagtgggtgttcagggcgtggagagcccgcgtccgccattatggcttctgcgtgatacggctattctcgagccagttacgccaagaattaggacaccgaggagcacagcggactggataaaagcaaccaattgcgctgcgctagctaaaggctttctttatatgtgcggggttgcgggattcgccttgatttgtggtagcatttgcggggttgtgctagccggaagtagaaagccaaggagtgctcgtattagtgtgcggtgttgcgcggaagccgcagaggactaggggatagggctcagcgtgggtgtggggattgggcagggtgtgtgtgcatatggacccctggcgcggtcccccgtggctttaagggctgctcagaagtctataaaatggcggctcgggggctccacccgaggctcgacagcccaatctttgttctggtgtgtagcaatggattataggacatttaggtcgtacaggaaaagatggcggctcaagttcttggtgcggtataacgcaaagggctttgtgtgtcacatgtcagcttcatgtctgagttagcctggagaggtggcacatgctcttgaatgtgtctaagatggcggaagtcatgtgacctgccctctagtggtttctttcagtgattttttttttggcgggctttagctacttggcgggctttgcccgagggtacacttggtgcattatggtagggtgtggttggtcctaccttgtgccactcgaagctgaggcaaggctaagtggaagtgttggttgccacttgacgtaactcgtcagaaatgggcacaagtgtgaaagtgttggtgtttgcttgacttccagttagaaatgtgcattattgcttggtggccaggatggaattagactgtgatgagtcactgtcccataaggacgtgagtttcgcttggtacttcacgtgtgtctttagtcatcattttttcgaagtgcctgcccaggtcgggagagcgcatgcttgcaattctaacactgaagtgttggatgatgtcggatccgattcgagagaccgaggctgcgggttcttggtcgatgtaaatcattgaaacctcacctattaaaagaaagaaaagtatctaaggccatttcaaggacatttgactcatccgcttgcgttcatagtctcttacagtgctctatacgtggcggtgcaaactaaaactcagcccgttccattcctttgtattgttcagtggctagtctacttacaccttggcctctgatttagccagcactgatctcaagcggttctctaagcctactgggtataagtggtgactttggccagagtcatagtggatcacaaatcactggtgaagaggtagaatcctaccttcttccaaaatctaccccatgactattgctggggttgcattttgatttcaatgaatattttggatgccaacgacacgtctgatagtgtgctttgctagtgtttgaatttaaaaccgaagtgattgttttcaaaatgtatttacggatttgcttacttgttgaattcattttaattacctttagtgaattgttactttggagtccttaaagttttcaataatttttttggcagatgatactcaaattacttggcacttaaatgtactttctttcaaactcatccaccgagctactcttcaaatttttaagtcttataacacagatactgttaatgtaaagtgaacattatgactggatgtcaggagtatttgaggttctataccagttcaggctttgcttttgttgctattgttgatgctatattgactaatggttttacttgtcagcaagagccttgaattgtaatgctctgtgtcctctatcagacttactgttataatagtaatattaaggcctacatttcaactttctgtgtgttcttgcctttatggcatctagattctcctcaagactcagcaaatagtgctgctgctattgctgccccagccccaggcccagccccagcccctgccccagccccagccccagcccctgccccagccccagcccctgcccctgccccagcccctgccccagccccagccccagcccctacccctgcccctgcccctgccccacccaaccaacccaatccagtccagccctgccccagcccagtcctagccccaggcccagatactttcagacctatcccaagcccacttctacttagagaaattcgaatcttcattgattcagtgctaaaatgcagtgtccatcactcagcctataagactgagacagcccatctataccccctccatactgacttctagagtcatggaatttcacttaatgcatagaatcgtattgctaaaatgcagtgcccatcactcagcctataagactgagatagcccatctataccccctccatactgacttacagagtcatggagtttcacttaatgcatgcagtcctattgctaaaatgcagtgcccataactcagcctataagactgagatagcccatttataccccataccccctccatactgacttctagggtcatggaatttcacttaatacatagaatcgtattgctaaaatgcagtgtccatcactcagtctataagactgagatatccctatgtataccccatactccctccatactgacttccagagtcatagaatttcactttgcatacggtcctattgctaaaatgcagtgtccatcactcagtctataagactgagatatccctatgtataccccatactccctccatactgacttccagagtcatagaatttcactttgcatacggtcctattgctaaaatgcagtgcccatcactcagcctataagactgagatagcccatctataccccctccatactgacttccagagtcatggaatttcacttaatgcatgcagtcctattgctaaaatgcagtgcccatcactcagcctataagactgagatagcccatctataccccataccccctccatactgacttccagagtcatggaatttcacttaatgcatgcagtcctattgctaaaatgcagtgcccatcactcagcctataagactgagatagcccatctatacccactccatactgacttccagagtcatggaatttcacttaatgcatgcagtcctattgctaaaatgcagtgcccatcactcagcctataagactgagatagcccatctatacccactccatactgacttccagagtcatggagtttcacttaatgcatgcagtcctattgctaaaatgcagtgcccataactcagcctataagactgagatagcccatttataccccataccccctccatactgacttctagggtcatggaatttcacttaatgcatagaatcgtattgctaaaatgcagtgtccattactcagcctataagactgagatatccctatgtataccccataccccctccatactgacttccagagacatagaatttcactttgcatacggtcctattgctaaaatgcagtgcccatcactcagcctataagactgagatatccctatctataccctctaccccctccatactgacttccagagtcatggaatttcacataatgtatagatttctattgctaaaatgcagtgcccataactcagcctataagactgagatagcccatctataccccctccatactgagttccagagtcatggaatttcacttaatgcatagaatcgtattgctaaaatgcagtgcccatcactcagcctataagactgagcccatctataccccataccccctccatactgacttccagagtcatggaatttcactttgcatacagtcctactttacttgtccatggacaagtaaacaaagaactcttgtccttcatgttaatcaagatacaccaatcaaacaagagttttatatcagagacttgccatggaggtatcatctctcaagtctcctttcctttaaggaaagaaaaccattctgtcattgctgtagtagtcacagtcccaagtttctaagcagtgttcagtcgtcttttctcatgtattaccttgagtactgaataattctgtcagaaatattttgtccattggattagactttagctagtccagccctgtgtgcatttagcaaaggggcaaacacaggtctgttatcagacagttaaagtgctcagtcccaattttcaaggcattggccattaaagggggtagaatactatatactgttggcatgctgtcatgggtgctatcgccccaggtcacatctttctaactgatggagatacatttatttgctcatgatattgtatactagtctcacatgctttcttatttcagccaaaaacctctgcactggaacattttatgtggataatcctgactaggaattgagtcttttctcaaggtcctaatactacccttgctttatgtaaagagggtgctgattacttaatgcctcttacacaattgtgcaaaattgcagttgttcaagtccccttctgttagtaaccaagatcccataccctcataccctaatgggtgacaatcaagggtgccaaccaatgagaccacttctctgttctggtctttctgctgtgctggggaatcaaaccttgagtcttgtgtacgctagtaaagcactgtcatagagctacagccccaccgtgtggtggtttgagagaacagcctcttatgtagcctgggctgggcgggacttacaggcattgccacctgtaatgtaaacatatttgtgcctgttgtgtgcacagctgcatttgtccctcttcctaagcattggataaagaaaccaaactaagtcaagtcattttgttggtaatcaagaagacctttgatctgtcctgtttttaacttccaggctggcctggaacttagcatataacccaggctagccttgagctcaggatctagcctgcgtttaacaagtgttggcatatctggttcctaccactatgccctgcatgcagtctttcatattgtgaatgtgcatatgtcatttcactgtagtaatctgcatctggtgaagacttatttgtattgcagcagtatttaagatccttaacatagtaaatgtgcacagtgttaactctattgtacatattctcatgtccacagttgtgccttttagatcaggactcctgtacttagcaaagcaaagaggctcactaatataaagcttctttcatgagactatagattgaaacgattccaatacggtcaatggtccttcaaggtaagacttctgtctctgatcattcatatcctctttgctttatggaattatgtatgtgctgtgcacttgaaaccccttcctcaaactatttatgtacatactggcaattttagtaggatcaattttactcttaactttgaagtacagaagtggtgttgacctataaggtcccattttgtggcttgctaataataatgactgattgtagtaggccttttctgttcactacagaaggaaacctgaacagcgtaaaactgtaatggccataaacatgtaccttgcatattagtatgcatttactgcacacatctcattccatttggatacgatcctactctcaaacccttttgcagtacagcaagggtcactaatcttttggcttcttcatcttcctggacactggataaggctgtcccctcctttccactctttaatttccaggactattactttaaagacttaatatttgcataaaggatggggtttttaattgataacatgtcccttgaacattaatgtatataacagggacatgatccattcattttaataaaaatacttggccagttaatgtgtaaaattacacttatccacaaccttattacttttcggaccattgtatctcttgcactcctgcaagggataccgtttatctcccaaggtccctgctagtggaccattaatatacagtgaatcttcctttgtctttgccagtaaacaaaggccatactccttcgcctttcatttgcactatatcaggatatgctgatcaacaaggccgcattcttttggactgttatcatatattaaatgtatgcgtatgcactgccacctgctctgtgcacttgaaaggatcccactcacttccttagcaccttcagcaggaagtgataataagctcaagactttcatttggaaagttcacatgtctaagcacttctctaagaactactgtaccctcttctccgctttaaagcagaaagagggttgtacgaagtgctcttcatttggacttaagtgcattaatgcagttagttgtccatcattacctttggagttggattttacatccttgtactcttttgacaccagaggcatattaattatttctgagcacttctcttgtcaatattaatctgtacccttacacatatgacctgtgcggcagcaaaggttctgaaatgcctaccttttgactggggctgctgagtggtagtaactattagtaacctcagcatttggatgattactatgcaaaaatgtcaaggacctgtgtgctctctttgcataccatcaaggctactgagtcccagaattaattgctaagttatgcgtatttataactatgaatgtctggaatattttgtcccctttacattattgcagaggttgctgagcccccgaaactacccggtactgtcaatgagcacaggggctctgacgaatgacctgctctcttccttaaactgattttgggactcttaataggcacaatggcagttctggatggtttattttctactccaacttgagcaaatcccctgctagtttcccaatgatataataaagtacagcagtatgtacacccaacaatgacccggatttcgaccctttttgcattgctttaatatatacaatcctaaatagtcacaatctcacactttatagtgttccttttgcccggcctctagtttgtccattgaccacttttctgaatcactaattctcacaaacccatcattaaggaagagtttgtgccctttctcaattccatcatgccatcccttttgcctctttgtttgaacagtattgactgggcaaagcccttctcttgacttaaagtcaacaacaccagtttactcacttcatatggctacagtgtctcagttgccttctccttgctcccactgaacagagacacctcgaattcttacattattctgggtaatgttaattaccccaaacaccctatgtgtcattaataaattttggtgtatttatacactgaatagcaaaagcaggccaaaactaggtggatgagccttcaatctttaacttgcacttctaaattattccaattccaactgctggcacattctagggccaggaaccattcttgcctacctttattaatgctttattgtgcaaaatattgcaggcaagtagctcagggagttggattgccaccttttacttggggctttcctttacagtatgaactgaaaattgtcttcctgagaaggaagcttagcacttttctttccattcttcctccaggaaggagccaactgtctgcttaagaaactttaagcccgattttgtatattgctactgtacaggaccaactgccagaaaagttattgataattttattccttaagaaaggcatttggattgcaaggtggattgactgtgagatcattagcttttgtgaagtaaaaatagccatttgtgtcatgtttctgaagactaagcagtgtctcagtgtactgagggtgatgagtctgtggaaagatcagtgcaactattgcagaatgtttaagacaagtatctttgcttggtctttactacaagtttaacaaaacgaaaaagtcaatctttgtgtggcctttagtatgattaactttttggaagatgacctaagccttctaatcattatattttgtctgacattggtcaccagtccttgcttatttttaaaaggtgactggatggattaaatttgagaacatgtcaagtcgcctttgaaaattatataggccatcacatttaattaattcattctatccaccattaaactctggcaataatttgaagtagcttgaaaattcctaaagtgggaatttattttagagatgatagaacctgtttccccactttacattttaaaatatgtctgccaggatctaatcattcctttaaacgtacacttcaaagagagattttcctagtaagaaaagagctttctctagtgtgaagggtgctttgtagccgccgagtacttaggtcttttttgggagctattgtgtatgagtgtatgtatgtgtgtgtgtacatgcatgttgctgcgcgcagtcattcattcacatggtgctcagacaacaatgggagctggttcgtctatcttgtgggtcctggagatcaaagtgagatcatcaggcttggcagcaagtgcctttaccctccgcgtgccatcttgccatcccgctgctgagtgtttgatatgacattgctgatgaaaataatcatcacaacagcagttctcccagcattactgagaaatgatactatttttctgaggaggatgttcaagtaactcatccagtgcaggatcctgcttgaactactgctcctccgttacatcagactctggctgtttagactacagtaagtactaccttgttagctactaagctatctttttctcattcgagtttctttctgtgccacccactgaaaagtcaaagtgactaataagtcactagctcttctcagcttatccatacacaacacatagtatgccaacgaaattgtagaattaacacattgtgtacccaatcgccattatgctggggtacactaaaatgagaagcgatgatattttacaaaatttcttccgtgagatgattatgttatttaagacttaatgtaatataagcacacttgagatcattttaggaaatgtactgcctgtgtgaattgtttaagtattttaggaagtctactggggttgaaatttgacttcttaaagagggaagtgtgcttactttgccttgttggtccagacgactattagtaccatctggttggtttatctgaatgccatctgtttctatctacctcttggaagcatggaaagaatattaagagtgaaagactccatgcattatgcttagctgtacgccaagggtagcaagagatgagcttgtgtaggaattgggaatataaatttgataatttggttctttcaaccatttttactgcatttctgcccagaacagaccactggacggcactaacagcttagacagagaacttcatagcttacaatctttttttttttttttttttttttttttttttttacaaaagtgcaaagaaggataagttttatgaacaaattttactatggactactttatgtaccctccttgctcatttttctttttcattaattaatcaattaattttgttttgttctctgttttgttttgtgacagggattctctgtgtagtctggctatcctggaactcaaactcaagagatccgcccgcagagatccgcccgcctctgcctccagtttagagtgttgggattaagggtgggtgccacactggacccctgccagcacttttcaacagatactttcagttaaaacaacaaatacttgactcctgtgtagaaaatggtctagctgaaaaaacatccttgtccataacacttaacatttttttgcatttgccttttgtacgtgcaaatgaccctctagtactttaacccttttaagtccactgtaaattccttcgcagcaggtttcccccaactccaaaggcttagcattgtctggctctctaggtgataatacatctagaactattgagtcttttaggaaactaggaccattgttgtacaagtaactgcttcaaaaggaaacatttgcaaggaaaaaaagctttttgagatgctaaagaatgtgtttggtgcactaagacagttagctaaagcttcggtctcaccttagcaccattggctacccaccccagtacatgcaaagtgaccccccccccaggcttgcctaggcacctagagctttcagcctgcctcctatggacctaaatagagattaggactcagactccagttagtggcctggaggaagctggtactgctgctattcacagtaaacccactatcactgacagttccctattgaaatgatcaagttgtgtgagcaggcagatcattaatcagggccaattctgtcatggcaacctagtcctacatgacctccacggcactgtaaaatacacacttatttgtagtaggacatctggaacatgagcttgtctgtgattgaaatgtccattaggaggtgccatcacacaaaaccatctggaggccatctttggtccccataattgatggaatacaaagagttccccaaattagtgtcctgacccagccctcactgtcagtaatcatgtaatggaaagccaccaactcgccatcaccatcttcaggctgcctgaactgtatacattaagaatgagctttcagccgggcagtggtagctcgagcctttaatcccagcacttgggaggcagaggcaggcggatctctgagttcgaggccagcctggtctacagagtgagttccaggacagccagggctacacagagaaaccctgtcttgaaaaaaaaagaagaatgagctttcttccaagctgtccaatggcttgacccagacttaggagtttgtaaacaaagaaccctgtagaacaagtgaatttgagaatgtacaccttcattaagtggtgggaagtggaagtagtggattttgccagctgattttacaaagccctgtggcagaaccagaccaggtctttgtatgcatactgccatataacctagccactgtccaacctgtgccctctctcccagtccagtgaacctcttctgcctgccccttacttagtcctctggctcatcccaggggaagatggctctatttgtgtagtcataagaaagttttgttaattttaaataaaacaggaaaagagaaagctcacttaagacgagagctggagagatggttctgttagtcttccagaggtcctgagtacaattcccagcaaccacatggtggctcacaaccatctgtaatgacgtctgactccctcttctggcacacaggcatacatgcagatagagtactcaaatatacaaaaagggaaaagaaatgaaaggcctttgaaatgtagacatgctttcaattttaaaggctgttttcacatctcttaagaactaggggttccatgagaacatatcctcaccctgagttcttaccaccaattgaaaacgctgacatgtgcatatgaagattgtattgctagtaatcaaattatcatttgtagagtttagtataattatcatttgttttccagggatgaatttggagtctgttttgtgctcctgcctcaagaagaaggattgcctggatttagaggagtgaagagtgctggagagagcccaaaggtatttccgttacttggttgactgagatagtatcttcccttaaaggtctaatgtgtcaagttatacctcctaagtaaatacctcattattttcatgtggaattttcaacaatttttgtagtctaatgatagccttgtatttcttcacagggacaaacaatccctatgtgagactcaaggactgccagcagcctatacagctacattacatctcagcagaacttctcttcaagtcctcgctactctgaacaaaaagcttacaggccacatggagaaaaaaaggtactttggagaatttgctatttgggggtttctatctgatctccagttcatcagagaatgagggggcaagtcaataaagcactccccatctcctggtcccctggcatagtcagttagccaatgagatccttgccttatgatgaggccttgaaatcatccccaccatgttatgaccaatctgtaacatttctgctctgaaatgcctaaaaggtaggttatcagaggaatgaaggccagtttctgacaccctagtcttttgtacttgatagagtaagtagatatggctgttgtcacattctgtaggcctgtcataattctggtctctgaatatcctcaaactcagaggtccaatgctacaccagtttctagggacatatgcaccataagcactgagccaaacaatgctattcaccttgccagtgttctggcatggtattgtttaaagcacaaattaaaagaagaaaataatttaacccctttattcccagagtatttgaagtacaaggactttaacacaacctataatctaaaggatctctcattggtaggtgacagaataaaagccagaaagaacttggatggagcaattctcatgtctctaagttaacactaagatctacaaatgtgaagggttcactctccaagcccctccccatgatttaacacaactgctggttactacataatgagacaactttcccagtattcttgatttcaagaattggcttttctttcacctcttttccagatctccccccagaattgtgggcttgctgctttgcagtgctggcgacctattccctttgacgatccctaggtggagatggggcatgaggatcctccaggggaatagctcaccaccactgggcaacaggcctagcccagatttcagtgagacgctttcctgaacccagcaaggaagacaaaggctcaaagaatgccaccctacatcaaagtaggtaagttttctgcaacagtgtaataattttaactttgatcttgttttccattaaagtcagccttttacttgagatatatacataaattttatctttttcccacatctgggaaatgtaactaaacagtgcaaatgtttcttctaggagaaaagctgctgcaatagtggcactgaccttcgaggaagccattctgctctatttggttctctctccagaagctaggaaagctttgccagctgtttacatacttcaagatgcactgctaccctactcatgccatataatacacaagtgagtagcttatttacctacctagctatttacgagtacactgttgctgtcctcagacacaccagaagagagcaccagatctcattacagatggttgtgcgccaccatgtggttgctggggattgaactcaggacctctggaagagcaataggtgctcttaaccactgagccatcactaacattactgatgatgaatgcctctaactacaaatggaaacctggctggaattgatacagaagtatctatcattaggcagaatttaaagagccaggatgttctagtacttctttcctggcattcatacagcttcttttgttctttgtagtgccatctaccaaatattacccttccccaaagcagcacagaaaactgggtcttcagcgtgatcaagcaatgtgaacacacaaaaggaaggcagctttataaatgacccgaggatcaacatgcctgactgcagcatcttaaaagcaatagaatgaggtaagtcactagcattgcagtcttctgaggatttgcatttgctggaagatggtgctgggtggagagcatctaatgtgataatgtgaggcagggccatgtacacgatggaagatgaacaggctttcacgttatcaaatggcctcacagcagcaactcaaactattatctgcttaccagttatatcacaagaggaatttagcttctaggttttgttgttgttgttgtttgttttggcttggtgccctaccattcttacagacttaaacattgaaaagctttaaatagtttatttcttatctccatctgtgaagcagccattagacttgtgaaggatgtaaaaaccaagcccccccttttttttaatagaagaggagagtgaagctgacaattaaatatgcagtcgcttatagtgtttgctgcttacagaagcttttaatccatgtaacagaatgttgagatgttcattctgtgtttaaatgtaatattccctagatgtatgccctttggcaatttagttctgctaagacctgtctgtttgtgaaggtcaaatgaaatcatgaatggaaagtgttgagtacagagcctggcaaatatgccctggagttgcatgactaggccatttggaagagttgacgggtgtgtcctatggtcctatgttaaggaaaccttaagtttaacgttgatagcctggtacagtgtactaatggcaatttttttctttgcccttccctgtttcttgttaccctctttctggtggtctttgcttactatcaatcattagtgtgtattgtgggtgtgtctatttcttgttttatgtatctattttttccttggtctgtgtgtctaattctttgttacatctatttcttccttgctttgtgtgtctatttcttccttgctttgtgtgtctatttcttccttgcattatgtctaattctttgttatatctatttcttccttgctttgtgtctatttcttccttgcagttgtgtctaattctttgttacatctatttcttccttgctttgtgtgtctatttcttccttgcattgtgtctaattctttgttatatctatttcttccttgctttgtgtgtctgtcttccttgctttgtgtctatttcttccttgcagttgtgtctaattctttgttacatctatttcttccttgcttttgtgtgtctttctttcttgcttttgtgtgtctatttcttccttgcagttgtgtctaattctttgttacatctatttcttccttgcttttgtgtgtctatttcttccttgcattgtgtctaattctttggtatatatatttcttcattgctttgtgtgtctatgtctccttgtgttgtctaattcgttgttgcatctatttcttccttgctttgtgtgtctatttcttccttgctttgtgtgtctatgtcttccttgctttgtgtgtctatgtcttccttgttttgtgtatctacttcttccttgtgtgtctaattctttgttacatctatttcttccttcctttgcatgtctccttctttcctttgtgtgtcttttctgtctgcagtgtgtcttacctattcccatgtttctcctgcatgttctttcttgcagagctttgagctttgtttcactttctctggtgcctgtgtggtctgctttgtcttcactagctatggctctctgttttatctatctggttgctatttctcttagcttttctttcactcctgcctttcgtgactcccctttgggtcacatgttgcatgcatccctctctttttcttgtgctcaccccacttgttctttgttcaagttctctttgtcagtccatttcagttttctttctgctgcttctatccttagtgaattcttgtttacatttcttccctgcctttcttgggccactttctctgttttcttttgtatttgtgtctctttgctattggtggatttcttatctcagcatcattctgttgctttgtgtttgcttgtgtttctatcttctactttcctcctttctgttcactttgagcatttcatctctttacaagtctgtgtctctcttgtattctaaagtaatcctttcttggatgtttctttgtatgtacatgtgcgtgtgtgcatgtgtgttatgtgtgtcatgtgtgagaggagcttcatagccccttcccaataggtccagaatgtcacccgtggagccgttcctcacaccagactgccctgagaaataatctaagacaaaatacatcattccgtccggtcaggattcaagtggctctgaagtgaacgcccaagtagaagacagaagttttgcgacttgagatttaaaaggaccaaaatacacagatggcccgtcttgagctggctggacagaatgctgacaacccaaagaagaggaactgtttctacaggacacctgtgacttccaagagcggggaactacgtatgtcataagacacaaaacctgagctaagtccaagcataagacctaaggacccaatcctatatggacagaatatttaagagataaaggcctatggcccagaactctggaaggatatttctatccttctatccccaagaccaagaagggaaattcgaagatgagacctgccccccaaccccagcatccctttccatttcttatatttctatttaagctgtcttcacttgagatgtaatttttcattgttgccattgcccataaaggaatacgtttttagctggatagtattgtgcaagggtctgttttaaactgggtcttagccatttgttaaattgttgatgttttacaacttccatttctcttcacatctgctccacttgagacggaactaaatccagccagtgtatatagcctgactattgaaacttccctaggaataagcatgcatacagatatgcatactgccatcctccctacctcagaagccctaggctgacaagaaaaggaaagcatcaggttgttagggggaaaacaatgtcaggctatctagagaaaatataaagagttgttccagaccaatgagaagaattagacaagcaatatgcagatgtgccaaccctctgagaagcaccagccagtgtcaccttctttctttgggcttaggtgagcagggtatggttttctaataatggtttggggacaaaatgaggtctgaactccctgctcatagtagtggccgagtaatttggtgcatttcaccaaaggaactcctgggtctaatacctacctttaaaattaatgatgagagactctaaggactacttaacgggcttaatctttttcgtgccttcctcttcctctgtaagagggaagttaaatgacacaggatgaaaaagtaacatgctcatagcacattggcaattatacatggttattatctgaaagtgtagagcttttcctataaggcatcagactaagtacctgaagctttgtgggttcatggtcttagttgcatattccttagttgcaaatccttttcaaaaggtaagaaaaaggcacactggtctattgcctgtacttgatcaagccctgatatgaatgccagggaatgtctgagtaacattaatttccttccctgcatattttttgtgctgaatactaaggctgtgatgcttcactgtggtcacccccaggtaacaagatattaccaggtaaccaggaaacgtatgaatacgtaaaccatgaagcctactgtaacttccaagtcagtgctgagtatgtattacatagtagctgaagtctacgcctctgtgtgctataggcacaaagattgctctaggaataacatgctttgtaaaaacaaatatatgaacataacggggcttgaatgaataacagtccatatacttaaggccagtgtgtttcttctgctttggtgaggctcagtaagttatattataccaggtagcagaagagaaaacacatggaaactgattttaaactacaaactaggtcactaatgcaggtgattgattaccctattctgatcaccttctaatttctgaatacccatgttcagcactgggaataacaaagggggacattaccacagaactagaatttacaaaagaatgcattaaataaagcattatacagctatcaattgttccatgtgtgcaaatgaatgactactaactacctctgatgtatccgatattgttttgggtacatgaaatattcatgagtaactgccatgaaataagaatgtttgcattccatactattcataaggaatgagccaatgcttaatttaatcagtcaaaacttgagtgataagggcatgttaatacaagaacatttgcccaggtcacattatggttgtgggtactttcttaactataaagcagttcagtagtataagacaagacaaattttctatagaaataaagctgcctataaaataggcatagtctctacaaaattttcattgtactttttagcccataatgggaagagtacagttaacaagctgggtgtggtagcatgtgctctgagctgaagcaacaggaccacttgagcccagaaattggaggctagcctgggaagaccataaggtcaatctcaaacctggaggctaaatattgtctcccatgtgtatattctctttcatgggtactggagagatacacagacgtacatttcagtgtgtccacacttgagaataatatgtacgttggcattttatgaactcggaggtaccatataaatgtaacaattcattttcttacttggtatcaatttccaggcttttaaaattctgccacatttattatactgtgaaaataaagtaaataagtaactgtgaaccactgaatatatgaagcattcaatacttgatgagtacatactgaatggcagtcatttattacaaaacagtgcccttgctaggcactgggatgcaaagagcattctcattgtcctgtgtatctaaagaaattatgcatgagattaatttataatttgtaaactgccatatatatgtgtatatatgcaatatttgcctggtgtgcaatgactttgcttttatcccaggcatgcacaacagatctgtgtggagctttgtgaagtctacagttctataaagccgggacctaactgttggctttatcagtgaacagtgattactttctaagtttcataatggctgaaacttaatcataatgcttatcacctaacaccacctaataataattttaccatgctatgtgttgagcgaacacatagattgctttctagcattatgtagcacttataggagtgaaatctagaccaaaacttcaattcacttcaatgaggaaatgaaaacagaaaaaaaaaatggatttgtgcaaggcagtgtgctaaatgttacactgagtggactatgctgtctaggatacttcccagctggcttgactgaggaggtggaaaaggttttattaatgacaggaactttttccatccagtttcttaaatgtttgttgaatgctgctgccagagatgaattacaaacaccttgccagtaaaggagttttatagggccagagtgagataatcccagagcatgggtatcagggaacaaaacgggaagaggccagagcatctgatggcatgtactcagtgtggcccagaacctctcgaactagatgtactggctggagggaccaagcatgcagaacacaacacctaatgaaacattgtatataaaatatgctaacctaggtcctaaaactaaaatgtgaggtggacctagtgtagatcactgatcataggagacatggtctcataaagcccaggctggttctaattggtgactgtcacagcttctcaagtgctgagattacagatgtgcttaacccatgcccagcctgaagaatatatctgattactgagtgaataatatttttaaagaattatatattttatgtatatgagtacgctgttgctgtcttcagacacaccagaagagggcaccacatcacattacagatggttgtgagcccccatgtggttgttgggatttgaactcaggaccttcggaagagcagtcagactcttaaccactgagtcatctctccagccttctgagtaaatattttaactataatggctgtttgcgaaacccaaccaaggccaagattccttcaacataaactggagacttcctagctaaggaagctccaaaagtcattttctcattggcctagcttgaagccaggacagacttaaagtctgtcctttaattcattacccattttccttttcttactgttgaagtgtttcaaaggagaatcaagatgaatcgataattctaaacgtatttgttcattgcctggctcagcgtcatgtgagcaagaagaatatactatcacactcatacttttaacttaagtgtgatgaaagtgcagttctaagtactaaaatttctaagtactgaaaagaacaaagacatttaaaggatgcaacccaaagtgtactttacctcagtagtttctgaggggactgcagtcacaccttgagactacagctctcactttagctgggaaaaacatcaaggtgtagaggaggcaagttaaataaaaagttgctcccctcctcatgggcatgcttggtagagtggaaataataaaagaggttctctatttcctcggttccacacattgcagaagatgctactggatgctaagtgcaacacatttgttccaaaagggcactcagtgtgacttacagatgccccggaaagcagagggatgctctttattaaacagaaatattagctcaaacgttttctagactgaagaacactttcctcatttcccacagtttgcctcagaggttgaatacaggaaggttattattcattcatttgctttattggttcgcctgttctacaaggatttgcatgtctcttaggccttcacttggctcctgagacatggaaaaaggaaacatagacatagggaagtgctggatggggggggggggtctcttttctgggtagtggcacgacttagtccttagtccccaagtaatatgcaatgtgagtcctcatcctcatgtcttctccggccactgcaatgagtgggaagctgggctttgtagcaagcctgaccctaaagttacagaagccctccacgctaagaaactcaattttctaggccattttagctatgactgtgaccactactggtcaggagggatgacagccatctaagttccacaatcttaggctactttgcattatcctggggcaaacaagccatttttgagctgcagcaggctttgaaatacattgaccaattttgcctgtgttcgttaaaccttttacctttttacatgctaatgctcacagtaatttagaaatgttctccttactataatatactcaaggtggcttgctatggtaaaataatgccagtggatgaaaataacattaatgtttaacattcttgcataaaatttaagaataataaaattgacaacaatcagaaaactggaggaacgaaagaccaaattgaaagaacttgaaaaagattaaaaatgcctgtgctttgaccctttccatttttctttcactcacagagggtgggacaggaggccgagtgaaggaaagggtccagcctgtctatctggaatctaagttgggactttaatgcagttccacaaaattggtattaattcgctaaatgtttctgaaaatgtattttcatctaaatggctatcagctaagccttgagtcaaatgggaatgaaacagattaagtcaatgtgatctctttatccaagttgccttagagctgaagtcacaatttgctgtaaggaagcttattcattgtagcatacgcatactttcaaagtatctagactttacttagtaacccaatcaggacattcaggcaaaagaaaaggaacagagaagatggagccaggttgaagaggtctgggagttcaaacaaatttttttcattttcattaaaactcaattgggcatcaaaagtgttactaatattagcttttaattagtggaaattggctggattcagtaatatccctttgtatgggtaggaatgggcttacatttctggaatttgcaaaggaaaaaataactgaaagccttcctttcacagttactgccatcaatattgctaccaattaagcacatcctaccatcatctgctttgatcacataaatgaactgtgtaccaatctgttgttgaaagactggagtcatcttcccaccaactgtgaaaaaacacatggaaaacacctggactttgtgaacggatgcggaatacagaacttctgttgactcttgggtgttttgaagacttgaaaaaaaaaactgttgcttaccaacatgtcacaatgagtccgtgtgtgggtgggtggatgggtgggtgggtgggtgggtgggtggttgagtgggtggggtagtttgctgttaaataaaatgctttgttttgaa

SEQ ID NO: 21 - DNA, 1693 bp, Mus musculus
cagacattttagtcgacctctaggggttggttataaggcagggattttagcgatctccccaggtccctggcggcggcaggcattttagtgatagcccaggtccccggtggcaggcattttagcgatagcccaggtccccggtggcaggcattttagcgatcttccagatccccagtggcagacattttagtgatagcccaggtccccggtggcaggcattttagtgatagcccaggtccccggtggcaggcattttagcgatcttccagatccccagtggcagacattttagtgatagcccaggtccccggtggcaggcattttagtgatagcccaggtccccggtggcaggcattttagcgatcttccagatccccagtggcagacattttagtgatagcccagatccccggtggcaggcattttagtgacctcccagatccctggtggcaggcattttagtgatagcccaagtcccccgtggcagacattttagtgacctcccagtaagcggtggcaggcattttagcgacctcccagatccccggtggcaggcattttagtgatagcccagatcctcgacggcaggcattttagtgacctcccagatccccggtggcaggcattttagtgacctaccaggtccccggtggcaggcattttagtgatagcccaagtcccccgtggcagacattttagtgacctcccagtaagcggtggcaggcattttagcgacctcccagatccccggtggcaggcattttagtgatagcccagatcctcgacggcaggcattttagtgacctcccagatccccggtggcaggcattttagtgacctaccaggtccccggtggcaggcattttagtgacctcccaggtccccggtggcaggcattttagtgatagcccagatacccggtggcaggcattttagtgatagcccaagtaccccgtggcagacattttagtgacctcccagtacccggtggcaggcattttagtgatagcccaggtccccggtggtaggcattttagtaaagtctcccagtcccaggcatccatttgagccattagtccgggaacgtggcatgtatgttagctatctttccaggtccctgaccggtagtctaaccacctgtaagggacagacattttaaattttggctccaggacccagcagacattttagttattcctccgttatgcggcaggcattttaactatcggttcgggactacgcaggcattttaccttcatctccgcatagctggcaagcattttaggaatctttctgctgcttggcaatcactttaaccatctcttccgctgtcccgcaagcacgtagccatcgctccactgtcctgaaagcactttgccactgtcccactgtcccgcaagcacttagccacctctcccctgtcccgcaagcacttagccatcgccccactgtcctgcaagcacttagccatcgccccactatcccgcaagaatttcagccacctctccaccaccccaacaaggacttcgggcacctctccaccgtcccgcaggcactttaggcatctgccctctccttagcccgcatctcacccaccgctccgctctggccacctgtctagctggctatcacgctcttcttccatcacgcgcttgccgcagccgcctcccgggagtggatgcaggactcaaga

SEQ ID NO: 22 - DNA, 2408 bp, Mus musculus
ccagggatcctagcaaaccctcttctgacattggtgcccaacaggcatacacatgattcacaaacatgcaaacaagcagaacactcatacacgtaaaatctaaaataataataaagtagacctatagagtatatataattccaaatggatttcagtagaagaccctacttacattgcacagaaaaagctgtctggctgcttcaggcatgccaatatcagcacatgtaaacaagcttccaactttgtttttgagtaatcaactcattattcaccagatctgaggctatttctattcaacagcacaagaaaagaagggagaagcaggaggatctctgtgagtttgaggccagcctggtctacagagctagttccaagacaccagggctgttacatagagaaatgctgtctcaaaaatgaacacacacacacacacacacacacacacacacacacacacaagcgcaagaaagaaaccattcgaatttgactgcatatgtacataaaacctttaaataaaagacgtaatttcaaatcaaatgaggtcttaagaatggagcctaaacctgtctgtctctttaccagacgcagggcagccagaaggcagccattcacaatccaggaagacaggaagggataacaccagaacccaacctccattttagagaggtctagcctcttgagctatgacacactatttgttctctaactacccaaagttgtattttactatgctaattagctgattaagacattaggtaaaggtgttctacaaagaaactgtaaataaaagacatactctgtgccttagcctatctcatgattccttttctggatgtcttcataaccaccttaacctctacgaagatacagagacacaggtagcactacagtgctgtatttgtttaagcccccaacaaacttggtggcttaaagcaacacagatctataaccttataattttagaagtcagaagttcagtgtgagacacctagttgaaattgaaattattatttgaaattaaattgaaattattccttctgtaagttttagagaattcatttccctgccctttttagcttcaaatttcttagctagtaattgccttcctctatgtctatagccggatgtagagtctttgtcaatcttttatccctgccatttcaatgaaacaacaccttaccttctaggggaatctttttatctcaaggtcgattgattagaaacctcagtttcttcctccaatgtaatatagtatattagtatattctggggagtcagtgtttgtctgcctactaacacaggtaagaatttgcataggtattacaaaatcagtactttgcaaatctttcttctcttccgaattgaaaactgaacattaatccaaacatggcggcagaagcctttaaaatcggcactgtcccactgaaggcagtggcaggcagagctttgcgagtttgaggttatttactgagaccttgtctcagaaataaggcattaaaaaaaaaacaaaaaacaaaattcaccccaaatccgcatcaaaaccaaagctgattgttaatttccctcctttctaaactggattcattccttagtgccattgtttgctcgtctgaacacactgaataaacactaccgggagggattttccgtgcctatagtaaataagaatatgatttttcagatacgaaccactgagaattgttttgccttgcccgccacccccaccccgaaaatactccttgtcccagatagtagaaacttaatgggttttcaaagcactcagattattttcgaatttcaacgataccagagatcgggtcattatgtacctcggaaataaacggaacgcagtaccaaaattttaggtctcaacttccaaggcttctcaaagaaagttatcgcagacttagttactcgttcttggttacttcacacgctaccagtaatttttccacttttctgaatctgtgccccccccccacattctttcatcaactttaatccaaacgcgtacaatcagaaaaccccactaaagcggaggtagaatcccattggtttttagcataatcacatggcgggaaaattgttaccaaaaaaaaaaaaaaagagcaaaaatcttacctgaaaaagacacgtgcggtgaggtagtattgctgaatttggcttgagcaatattaaaatattaagactattccaaagagtttttcggacacgaggctttccctgatgtgagtgtgtggattctagaccctgctacaagtcacgcccttaactttcttttccgctctagactgcagtttattacccacgccaggcttattgaacgctttgcatatctacctgtaacattttagccaaccatctctacgctatcccagacattttcatcacctctgctctgcccagca

SEQ ID NO: 23 - DNA, 222 bp, Mus musculus
atgcgtggatatctcggaaagtgagaacagagcaagggcgccgagcgcaagtgtgtagcgcttgcaggtacttttgggaccgagtggagcacgacgtagcgcctcaccggatcttgcgagattgcgcctgacacaagcgctgcactgagggtttgagggagtgtggggcgggacctaaggctcttgaggcgcgggatcctgctgagagggtgtggttagcac

SEQ ID NO: 24 - DNA, 1871 bp, Mus musculus
ttttaaaatgctgtttttcttgaaaaaaaattttttttaagaagctgatgaaactaagctacaccaataacaaactcaaatcacgtttgcaaaaggagaccttacaatcagtcaatgcttaaaatctctcaagagccgaagcagaagggatgctatctaactcaattcatgatgccagagtgatcctgatatcaaagccagaaagagacacaaaagaaagttaaaaatttatagcccacatccctgatgatcatcatcattacaatatccataacccgagtttgatggaattaaaatatccaggtgggatttactcatggaatgcaagaatgattcaacatacaaaaatcaatgaacacgatatcaccacaatacaatgacgatcatcttgatagcattaaaacaaaaacaaacaaacaaacaaacaaacaaacaaaaaaacccacggggctggggagatggctcagcggttaagagcaccaactgctcttctgaaggtcgtgagttcaaatcccagcaaccacatggtggctcacaaccatccataatgagatctgatgccttcttctggtgcatctgaagacagctacagtgtacttacatataacaaataaataaattaaaaaaaaaacacttggaaaaactcagtgtactcatgattaaaaactctcggtaaaccaggaataggaggaaattgtctgagtacataagggccacattgaaaaagcccacagctaacatggtcaatggtgaaaaattgagtgctttccctttaataagatgaaggaaccaagaatgtttgctctcttagattccaatcctaatagaattgatggtcctgtgcagaacagttggggaagaaaaggaatccagggctgggactgtaccacagtctgtagaatgcttttctctagaatgcataaagccctatgtgcaatcccaatagtggtacaagcctatgaccctgatactcaggacgtagaagctagaggatcacaattcaacgttaccctgggctaaagaccctgttttactttattactttttttttttttaatatctgaattgtaactgactggagtactctgctcacaaatgccatgattatttatgtgggggacttacgaaagtctacacacacatacacacacacacacacacacatacacacacaccatacaactcaggtaattcagctgtaaagttataggatacaaaatgagtatataaaagtgaattgagggccactgagatggctgagcaattacaaacacttgcccccaagtttgaagacctgagtttttgtttgatacagccctggctggcttggaaattactatgtagaccaggctggctaccaatttatttaagatctgtctgcctctgcctttgagtcctgggattaaaggtgcaagccactacagcaaacttggtgttatagtttaaatatatggtttactcctagcaacttgtatgttgtcttggtgctgaaatgtggtggcatctttaagagggtttaattaatttctcaagagcctagctgagttcttggattttaagaagaggttgctataaaatgatcctagcatctacctgatagctcttgtgcatatattatactggacaaaatagatgtttccctaccacaactctcctatgagttaacactgcttccaaccagaaactgagaaaatcctggccagcacagtcttgaatgtctctgtttccagaattgtgacctaaatttatctttactattcatgacttaatctaggttgaggaatgttgctataacaaaaaataatctgagataattgctctgactagaacatttaatattgttaaaatactacttctgttcaaagtgatct

SEQ ID NO: 25 - DNA, 1224 bp, Mus musculus
aaatacaataacgtgtcatacaactcagaactaattcaagaagtctctagagcaaccaaagcaacaaattaggaaaaataaagacacttggaacattctccaacctgggatccctctggctgtatcaaacagtggacacatggtatagccctcattttcaaccacatcaaacactgtatgtaaagcttactaaaacaaaaaaatctcagctagaaaatacagatcagaaccaaattcaggcgtggtagacatctgcaaggattagatggtacatctaattatgattaacatggtaaaagtgctaaaacaaaacaaaacggtagactggttttgacccccggacaagggacagaagtgcttattttacatatcaatgcagacctggcttccaggttctactagcagcgttcagtccctgcctgatataccttgttcccaaccttgaactttccagttcaggggcttagctgcccttccacaagacgttctttccaatgttatctagacattttgcgccccacccttctcctctctgcacgagcgcaccccttcttcccttttctcctctcccctctccccatggcaactcctcaatccttgaagccagtgaactccccgagagcagttccccaataagcctacctttaatgcaatcggacttgaatagtctcgtttcacgggcagagaagtcattgatcggagacaacatgcatgaataggagaccaacaccatcaacacaaccgatgctcaaaatcaatagcattaagaagtgagcattcataaagatttggaagctaacacttcagagcacactccagaagaacaaatggggtgtgaggggaagggatttagttagggattttgcttgtcattggcggtgcatctctgcaatcccccaaatctggaaggctgaggaggatcagaagctcaaaggctgcctggaatgcgtggggagaatctccctctaccaataaagagacaaacaatgccagacaagcagaatgtatcaggagacaactggaaatgggataaagatacaagataatacctaaaacctaatggaatgaatgaagctaaagccgcacaaaggtgtgtgtattggggggtggggggagttacagatgcgcattcctaaggaaggaatctctgagtcaccaccacctgcaggaaaaccttggcagaaaacagaaatgacaaaggctcgagcgtaaatacaaaatttt

SEQ ID NO: 26 - DNA, 1224 bp, Mus musculus; identical to SEQ ID NO: 25

SEQ ID NO: 27 - DNA, 2483 bp, Mus musculus
aagtgtttcctcgggatgtgctaaacctggtgctggcccagtatcctctgcaatgatagaattctacctagactgctccatttttcagccagcctctattcagctagactccagaaaaacaagttcagtgtttggtgttttgctatttggtcactaggtggcagtataagcccaggtttgtgctacagacttaaagccataaaaaggagcttggttggtcatatttttacaaatacaaatatttgtagtaccttggatgactttagatggatgcagtcctctgcagtgatctatactatagtttatatgtaactccaattaaaggcatttcaaatcagactggattagcatggatacatttttgggctgttagctccgttctattttgtttacatatgtttcttttttcactcttagggaaactcattccaacagtcccacagcttcttgtcagaggtcctcgataaatattaaaaggttgaattgaaacacagcaagttgtaacacatcacacacatgtatacatatatacatgtatacagcaaccatatgctagctcatagcacatggtagcccgcaaccctctataatggcatctgattctctctttcattgtccatgaagacagagaacacatatagattgagtaaataaacaagtaaataaatgatctttatacacatacctctagggaaaacaatatgaatatagctctcataaattctcaaaaacaaatttaaaaataaaaaaagaacttaaccacatagaattatactagaaataaaagcaaaaagatatagggaaaattcacaaatgcatcgaaatacaatttgcctaaacatccaaagaatgaaagaagggaaattataaaatatgaagatggataaaagcatctcaaagtagcagcagaccagaagttgtagcatggagtaatagttgtaataggaaatttatacttgtaaatactgacataaaagaaacattaaaaagacagttaaaaaaaatgggtgctgtaaatctgaccaagaacccacaacttggacactcaaagacccttggggtgatagtggtggaccatccattattattttgcttatcagacacatcgtctaactcctctctaaatacagacctccaacgggagaggctggctcagtggttgagagcactggctgcttgctcttccagagcacctgaatgcaattcctagcaaccacatggtggctcaaagcacatggtggcccacaaccatctacaatgggatctaatttcctctttcattgtccatgaagacagagaacacatatacattaagtaaataaagaaacgaacaaataaatgatcttttaaatgaatacttctagacccatggattagggtagctctcagacctccccagagacacttctttgtgtagtgaccagggctttgatgtggtcaaaatggagagaatagtatctgtagagtgtgaagggtgctcagttctaaatggagcatctatatcacacagttacatgcaaacctcagagaaaatcacttaagacaggggccatctgggctgggggttaagcagcagtgacaggaccggtgctcaggagctcacagcagctgtgattccaatactaggggaggtactcgatctaccgctgaggagccattgggagttaatggtgtggccctctgatagatccatcaacctgcaatggatgaccccatctccatgcatatatggttggttggcacaaacgggacccagtgtgttattaaaaaacaaaaacaccattaaaaaaaccaccacaccaggccaaagccatcatttttagcatcacaaaaaaaattgaataaaatgaacaatttcttcgactctatcagggaaataacattccccaaattacaaagtctcttagagagagcagcgacttgctgatgagtgagaaaacagctcctgtccacagacagtgtgaacacaggaaaacaaactgacgctttcttggaaggtttgtttgaataaatttaataataagataatccaggctatatccagcgagcaatacacttttgtgacttttcttcataggagccctagagcatgttttttagtgaaaatgatctccatagggattggaacagaaagagaaaaggaagcattctgaaacacccccatagcagtctgctctcctagcttcagcctcagacaaacgtgactcattagaaattcaagtaactgagtcccttaatccccaggctgacatgcaactcctgagctcgaacattgccccaccttagctttcataagactcaaaccgacctgaagggagggaaaaaaaagcccaattctagcccaccacgcttctgcttaaccgacgggaaggaaaactgtacaagacccaagaagaatcgctgtgatgaccacagttgagtggcatagatacagctaatgaacaccctgccaccatcaaggcctcctgtaatatcagagaaat

SEQ ID NO: 28 - DNA, 34 bp, Mus musculus; identical to SEQ ID NO: 13
  misc_feature (6)..(7): n is a, c, g, or t

SEQ ID NO: 29 - DNA, 32 bp, Mus musculus
  misc_feature (1)..(4): n is a, c, g, or t
  misc_feature (6)..(8): n is a, c, g, or t
  misc_feature (10)..(10): n is a, c, g, or t
  misc_feature (12)..(20): n is a, c, g, or t
  misc_feature (24)..(25): n is a, c, g, or t
nnnntnnntncnnnnnnnnngcanncatttta

SEQ ID NO: 30 - DNA, 30 bp, Mus musculus
caagcacttagccaycgcyccactgtcccg

SEQ ID NO: 31 - DNA, 32 bp, Rattus norgevicus
  misc_feature (1)..(2): n is a, c, g, or t
  misc_feature (7)..(8): n is a, c, g, or t
  misc_feature (11)..(17): n is a, c, g, or t
  misc_feature (19)..(21): n is a, c, g, or t
  misc_feature (25)..(26): n is a, c, g, or t
nnyayannycnnnnnnnynnncagnnatttta

SEQ ID NO: 32 - DNA, 31 bp, Rattus norgevicus
  misc_feature (8)..(8): n is a, c, g, or t
  misc_feature (20)..(20): n is a, c, g, or t
cargcacntyagccacctcnccactgwcccg

SEQ ID NO: 33 - DNA, 252150 bp, Mus musculus
  misc_feature (222949)..(223540): n is a, c, g, or t
  misc_feature (242091)..(242091): n is a, c, g, or t
agacctccgattaatccaacacagttggggttaggggtagcaaaaagaagggcacgaatgttttagagggtctgtcttttcttttccttcacctcttgcctttcttttcttttcattttgttttctatttctctttctaaggcctctttgtatgtctctgactggcctggaacttactccctaactcctgctggcctctacctctcaatcattctcaccctgctctctgggagctgggattataaatggatggcactgtgcacaccttcagtggctgtggcttaacaagttgtcagaaaacaaaagaggattcttttaatatccaattctttaaactgtgttcctacctggggactgttgtgctttctttagctgtttagctttgggttttttgttttttattttttggagattgagtcttcctctataactcaggataatccagctgcttctgacgcctgagtgttgggattacagacatgagccactcggagctcttgttattcttcttaccatggatttctagaagaagctcaataatactatataataatataaaatgtatggttttggccctcctgccatagggaggtaatggtaactgagataatgtagttccaggagtaaggggagctgggtatggtagcatcacttaggaatggtagtttggactggagacactctaggaaatagaatggcagaagttccggttgatgctatggcctgtgccgttaatatattacgtagcccagccaccttgtctctgtgcttagtgtgtgttgtatgtcttctgttaggtaccagatttgcttttgctttttctagttcatatgtttgggtagcttttgtatggcttcctctttcccttaagttttgcttgcttatgctttcctattcgtttcagctctcaaagcctcatcttcgcattgcgtgttggctttccatgtatctttctcctttacctccctttaatgagtcctgtgaataacccatctccagtaactgagaattcattgctagacctgtcctgttccaggttacagtgaatagtctgtagatctttggtgttacgctttttgcttaatatgacgctgcctgtgcttttactctgtttatttctaatgtacagttaacaactgacttcttccatcctctgtttcaggggtttcatttgcaaatgcctgcaggatccagatgggggacatgtgtgagatggctcctggtattcattctctctctctttctctctctctctctctctctctctctctctctctctctctcaaagctgggttttgtggtgttttttctttatcagagagattaccggatgccaagggacagatggtggatctaagaggatgggagagtatttgaggccccgacccatttaatgtgcaaaatgcatctaaagagaaaggctagtgggctggtgagatggctcagtgggttagagcacccgactgctcttccgaaggtccagagttcaaatcccagcaaccacatggtggctcacaaccatccgtaacaagatctgactccctcttctggagtgtctgaagacagctacagtgtacttacatataataaataaataaatctttaaaaaaaaaaaaaaaaaaaaaaagagaaaggctagtacttggctgctgctaattgtctggagacgtgcatccaggattgccagggcttctgattcgctccaagggaaacttgagtagcttcaaggtttttgttgctttttatgcctcacagtagaagactgtgttcataaatgctttaatagtcttatagtctctgtctatttgcagttgtattactgtgatgttaactgtgttctgttaaccaagggtatgtggaacacttcctactgcactcagatgagcccttggaggtttcctttgggcagagtttagaactggaccacaatgtgcttacatctgtgtaaattaggataaaatctaggaaaaatagatttttatacatacagaaaaacagagaaacagtagcaaagaagaaaagctggtttatttgtttgccgttggggagctggttccagctcagctagcttgggtgataaccatttgccatcatgcctggcaaaatcttgggctttttggttttgttttttaatgttcttctgaaaaatcaaataataggtctaaatttccacagagaaattgtttcaattagtagagcatttggccactatgtttttccttggatcaatccagcacactgcgggatgcagggtaagcaagaaaagatacatcttacaggctgtttccactgggtccaagctgtagcacggctattttaaaaggacatttaaaatttaccacattgtatgctaagatgttttgctgtttatgttacttcccccgctacttggggcttttaacattttctttggcgtgcgtgcatgcgtgtgtgtgtgtgtgtgtgtgtgtgtgtgtgtgtgtgtgtgtgtgtttgtgtgtgtgtgtttccctgtgtggagtgttattgatgaccagttgtcttcctcagataattaacaacttatatatggaagcagattctctcagtgagacagcttgctctggggggtgcctgtttccagcttttaagcacagggattgcaagtgggctgtcatgtccacacttgctggcattcagcttgtgctgggcatcctaacctggcttcttaaatgttaccagtagatacatagctaactgagccctctcttgagcctcaagttgccagcatcctccatttattttgtagaaaggagagaaggatggggaggttaagaacgtgcacatggagccggtcgtggtggtgcacgcctttaatcccagcacccgggaggtggaggcaggcagatctctgagtttgaggccagcctggtctcagagtgagttcctggacagccagggctgcatggagaaaccctgtctcgaaaaaaacagaaagagagagagagagagagagagagagagagagagagagagagagagagagagagagagaaagaaagaaagaaagaaagaaagaaagaaagaaagaacacgcacatgggagaatgcttgttctgtgtgcatgtgtgtagggcagcagcaggctcctggatatcagaggacagcatctagagtctgttctgtctaccacctatgtccttgtggttgaactccagatatccgcattatggctggtgcatttaccttctgagccatgatactgcgacccaagtttgttgttttcagggtgtttttttgtcccctcttgtggtgctaggaatagaacccaggaccatgtactaagtgagggctatgcaaaaccattctactattgaccgagctacatgcattgagcaccactgggaattctaggtaattctatctttgagccgtagccattaagtttcctttggtggcttttatgttactgcctcagccattggcgtagctggaattatgggcctacactatcagtccacttcccagtcttttttattgaaaacaagctaggctcaagttgtgtacctcaggctggcgtagaccacaatcatgctgcttcatcatccagaaaaagaggattacaggtttgccaaggctggatcaattaagtaattttattttttaattttttaaatgaactctcttaaaagatttatttattttatgtttgtatgctgtagctgtcttcagacacaccagaagagggcattggatcccattacagatggttgtgagccaccatgtggttgctagaaattgaactcaggacctctggaagagcagtcaatgctcttaacctctgagccatttctccagcccaattcagtaatttaaaatgcatgctattttacaagagtttaactagaagttgactatcagttgtctcacagatagtaaaggatagggaagtttgagaagttcatcaattctttaccctccctcaaaaagggaggccataactaagtccattgtatgcagtcagtgatttggggctcagtgtcttcagaagatttctaagttgccatggtgttgaagtctcctaatagtgagcctaaactgttttaactgcattttgccttgagcttttcactttacttagtgtctagttgttctttagaatgcacccaagtcctgatttgtctttgtaattaactctgatagggtatttctctggctgcatccctctgaatagttgatcctcacaccccccccccccaaccgccatgtggcaggtaaagatgtcccagtggctggcagcagggagacatctatccacttagagaatgctgtgccagtaaagctggcgtcttgaatttcagggtgagcctggagaagcaaagttactaagcttgttaagtatgaagtatttaaactcggagacgtagggaaagcacggggacaatacacaatttcaaggcttcctgagagctgagattaaatgtatgtataatgtctacctagatggttccttggctttttgtttgtatgatttattgattaattttggtttttcaagacagggtttctctgtgtcctggaactcactcccaaaaaagggaaggatagaagaaagattataaaatgtacatatattgatggaaattttgtcatagctgtgagattccttccagtggtctagcaaaggtacctcagaataagattcataatgaaattgaaattctttgggcttgtggatagtttcatagtcttaaggaaaggatgtctgtagatacctccattcctaccaggcctttggataatatggggtcctgctgatcttaatcttagtcctggttctgctgggtggctctgaaagccttatcagtccttggattgcttaacagtcaggtgactggagggactgctgactcatcgacttgctgtcttcaagtgaccttcaggattgtaggataaaagacctgaggcagacttttaggcacctctctggggtctggcacagtgcattgtaaaaggtgacaatgaaattccttaggtttatctttgtgctttcagccctgatgataagatagcttaggcatctgcagtttttagattgataaaccttgaataattaacttcaggcatctgatccaaaagaagtaaccaaaactaaaggcagatgttctaggctttcgtccttggtttagtgaccttgtaggcccaggtaaggagagaagtgaccttgtagacccaggtagggagaggagccatggctttttagcaaaagaaattctaagtgattgttattaaaacaacaggagaaacaacgtatggtcttccattagactacatatattagaagttattttgcattggtaaacatttagctaagcagacatacacactcataaataaaaataaaattttttgccaggcagtggtggcacatgcctttaatcccagcgcttgggaggcagaggcaggcggatttctgagttcgaggccagcctggcctacagagtgagttccagggcagccaggactatacagagaaaccctgtctcaaaaaaaaaacaaaaaacaaaacaaaaaaaaagagtctcagagagatctcagtgggattctatttgttgataaaaaacaaaacaaaacaaaaccaattaaataactaaaatgaaaaatttttgtaagaaaaggtatgtgactatcttagtatatctgagttcaactatctgacttaatgcatgtgtttgtttatgtattttattagtatagtctgttgtttgtgtttttttagacaggtcctaatcttaatgtacacctttttaccttgaattaaaacatagccaaggatggtctcgactcttagctttgtgcagtttttacaaatttctgatacactgctgttctaagaagtacttttattgtttaatcttaggtgtctcctatgtattcctaattgacctgaaactaactaacctggcctgaaactcacagcaaatctcctgttcccacctcctgcgtcctcagtcgacatgtgtgcaccaccatgtccttcactaacattgttttagtttatagtgcagtcatttcttatccactctcttacctgggatattgtccacagaacaacacttgccataataaacagggtcatcattttctaaatattagcatatattagtttttttttaagtatggtgtatttgtgacactcaggttttttagtatagttcatttgtgacatttttgtaggcttaaatctttcttacatcgttgtaattatgcaatattttccttttgtgtccagcatactttacttaacatagtatccttcatgttcatgcatcatgtatatttgagaagtatttcattgtatggacatgaattttgcttggccattcatgttgttcctataactctttatatggctacattttgttcttgtgctatgtgtacatagagctactctgaagcatgcttgttgcttttagctataggaaggaattctatcaggacaggattctttacatcttacaataaaatccttcaaattcacttaaatatgaagatacgggattgggctacgtatgcagttggtcctccacttcacaaatatgcttttcctttttctgtaaatatgcttttattttatgcacaaatatgcttttcctcttctgtaaaattccagctgagcctctgtatttgctttttgaaaaaatttgctattgaggattatataaaatcatttcaatttagcacgcagaaattataaagttataaagtatatatgctgatttctgtaaatttgacagaagttttagaacattagggtgggggaaagggtctcattatgtagttctggtgccctagaactcactgtgtagtcaagctggcctccaactcatagagatacgcctgcttctgcctctgaagtgctcagactaaaggtgtatgccagtatgtcagcccaactttaagatagttattaaaggcatataaagaagtctaattttatccctaaatttagttatttaaacatgttcaggtacctgtacagatgagaagcggtgaactactatgtggaaatgagtccaggtcatttacttagtcatagtaaagctggaaataataggaaggtctttggaatggttagagatattagtaaaagaaaaatggaaaagtctattacgtgctgttaagattttgtgcagtacctgtctagtaaaaacctgaatatgcctcataaagtcgggcagactcaacaaaacctcatgaggacttggggcaacaaccctagggagtacagactcttagaaagataattgtactatctggttaaaggactaattattactcctatcactttagtgtggctcaaggtaagcccaccttcctgagtgattgtcccttggccaagcacatgactcagcccaactggattaatttgtaagggaggagacaatggcatgcctgcacccagaggtaaattccattctttctgctggtagataacagacttccgtaatgtgccttgaatactaccgctgaaacatttctgctactatttccattatacgttatagacaagtcatccaacgagtgaagttcaaactttgctcaaagagtaccttctctgaatctaatcatacagcagcctgccatgctagtgctttgctatattttctagtattgtctttgtaacttcattgatagtcttgatatttttttggtatttttatcccccatgatcagtctttcctgataacttacagtctaccacacttaaaaatggtactccttcgaggccaccctggtctacaaagtgagttccaggacagccagggctatacagagaaaccctgtctcaaaaaacaaaaacaaaacaaaacaaacaaacaaaaaaatggtactcttttcaaagcagtatattgattccgaaatagagagctctcctttggaaggagccaagcatttccagagaacagtttgttttcttatacattggaacaattagaattgtttgtgtgtaggggacatgtacattggggtcagaggataagttgatagttctctccaccaaactgggtcaaacttggcaggatgcatctttatcccatgagcaatcttaccagcccagtattgtaaaataatataaccatcccttagtttctgactccagggcccctacccctagtgttacagctttcatgaacaagaaagccttgctccttgctttttggctagatcacctcccaactttttcttttccgggattgcctttggtccattacagaactaagaagacaaaaaaggttcttgtggggcaagtgctgtcagtcaggccctgcattgcctggtctctttagtgctctctagctctaggttttcaacctccctttaactattttgggttctgtctttccctatggtggtgggtctcagcctgtgagtcttgaccccttagcaattgtctacgaccattgcagacacaaatgtctacaataaatgtataaccatagcaaaattacacgcatgaagtaccaatgagaatagttttatggttgggggtcaccacaacatgaagaaccgtcttaaagggtcttagcattgggaaggctgagaaccactgctctatggaaacttatggaagttactctgccccaaaagtcacttggattaaccctggccccttagccattccaaatatgagacttgtgatcatttttactctgccatttgatctttttaatgtgctctcacaggacaacttgagcagaatctaagagattcctttaattacaaggtgcaaatgtctgcttggcattagatttgctgtctctttggaaggtgtgccgcatctttagaaaatctgtatcctttatgcctgctgctacccccagaatcttaagacaagggtaagttgtttgagataaggagtgcagatccttacattaaaggttcactgagtaggccctgctgagttttatgtgtaagcattagaacgttttaatcagtctcctttccttctgtaggctggtgggctgactcaaactaaaggaaactgcatgaccccctccagcattttaatagcttggcttgtcatctattaaggagcaaatggaaatcgtaggagtgtaataggaaatgttatggatacgggtgatacaagtatatgtgttgctttaggacaagaaggaaagaacatctttccttttagatcagcctgactggttgattttttttttaacattgcatagtgctttcaagagctaacattccaggaagcatgtattgtaagtaggtaaaaacaccagttctgctccagtttgttgacaaggcataatcctttatctgccccccagctcactctaattctgatttctcctattttggaatttattgtatgtccagtgtatttcaaggcggaatttaagggctgtaagagaacccactcatttaggacccctgaacaatgttgcaaaatatggttttctgtggcctaatgctatgcgatcaaggggctatcaaccaacaatggggtagcgtgggagaaagaaatgatttttttaagccaggttgtctgtgtgtagctttggctctcctcaaattcacaagcttctgccttgctgtgcctcctaagtctgcctcgtgagtgttgaggtgtgtgccaccacacctaacttcaaacattctcttaacatgaataggaaaaaggttttgtaacacaagttgcccagcttatcaggtgtgtttgaaaatgtgataggtcagctctccagccactggagtaattgataacaatgactgtcgctaagcagaaatgggcagtttttctgtttctttagcttggagcctgttcagcacgctcatggaccctcatctttctatcatccccttctcttttggagattcaactctcagggcacactttttatcccttagtcctacactattctagaactcatttagcacaggcccacttgtgaagtgttgagattaaacttgtcagccatcactcacagtctagcaacatgactaagcacgtattttctttctctttatatttaaggatataattttcaaaagttaatgtaagaaaggtttccttaatatcacatctatattcccctggtcagggaagccggttttcttcagagaaaatttgattgctagaaaaactagtaccttatttgttccttgggagtaaaatactatgtaatgaaactcattagtaacttgggtgtcctggtgatactacaattttcttgctaagaaactacagaaggtgcctctggtttgctgtcgttcccattagagtaagacccagaggtgtccacgtagatgctattatctgtgtttctttttgagactgcctgtcttcagccttttaaattggtgttttagtatgcattctgcgtttgacctttgactggatatgtgaacatgatagtgtgataattccgagtttgtggccagcaaggagctcctgtgcattaacctctagaatgttgaaagagtaatgaagagaagaaagaaagacctctcttgtcatcaggaggggggatgagcctgaatgcagtagtgctctttgtctaccaagaaaagtaaatgtttttatggctgttacatataatgactgcacacaatattcagtttggaccttgcaggtgaggtacttagatatgcctattttttattgtcttgaatgctttcattgcacttacacaaatcccagtgtcactacatatagaagagtgattcgtgtggatttgagattgagaagtagcactgttaaactgattgcttcaagttgtcctttggctcacatccttattgtggcgtgtgtgcatctgcgcacacacacacactcacatcccacaccctcagattaattaaggataatgctactttcccattccctctgcattcaagtcactgaggcaggtgggtgactgccttcttaatttttgaattcaaattctagcacatgaaatattgcctcagtaatgtgtaagtgccctccctgttttttgatacagaatatttttccattacaagtaatgagtgatcagagttgcccaatactgtgtaaaatgtaaggaaggtcaagtaggcaacaaatgcaaaaatcttatcattttatcacaaaatgcaaaacagtccttaaaactttgggaatcagagtagcactaccaatcttgtaagggttggttatctatggaaagtcagattaaattctctttgatatgcaatgtccttgaccttttggaaatactgttcctccactgataaatctcaaggtcctcttttcatttacaaatgatcaaggacaggttagtaatagcactaaaaccaacatcctttgctttagtcatcaggtaatatatttccggtaataagctatgtccttttaaaatttaatttaattattttggtttttggttttggtttatttttagtatgtatgtatgtatgtatgtatgtatgtatgtatgtatgtatgtatgtattttggtttttcgcgacaggatttctttgtgtagccctggctgtcctggaactcactctgtagaccaggctggccttgaactcagaaatccacctgcctctgcctcctgagtacggcaattaaaggcatgccccaccactgcccggcgctatgtcctattttgctcattagtttattgtgtaaggttatctaatgatattgaatcgcactatcaagctttgaacatatggttaaatagaatttcattgtactaaaaaaaaaaaaaaaagaatttcattgtactgctgagctttcttagtactttctcaataatagcattggaataatttgactgctttaatgggtgttattagcaaaccctttgatggtaattgtggaactgcttttcttgttcatggtaagtatatatgctctgtgtcactgaacagtatgtcttaatggaaagctgaagtaggataacttagaatcataccactgtttcttgtttcacgtgactttgacctgatatttgctgaaacaaatgaagtctttgaaatttaggtttcctacaaaaaacaaaggatagcagtatactgttcatgtgctctgttttctcagtgggcatgtgtgttgctagcctttgaatccaaaatatttttttcatgacttggtaaacagtgttagttttgcttgtattcacttgcaatctcttaaggatatgcaagagttaagtttctaggaataataaactatgaggattagacagtcgcacacagctccagtgagctttatttaatgacagatttgtgccatagagagttctggaaacactgagcaggttataagatgcagattcccagggaacaaacttcaagagagtgtggattacatgcttaagtctgatttgtatttgcttgttttcattcttcagttgtttgttcacttggggtgtttgtttttagtgctttgggtttttttcttctcaggataatgaggtgaattttattagaagccaatgggtaaggtagttcatttctttagctaagctgacatggcagtcagggtctgttttgtaaccaccaggcatcttggtaaggggaatctacctttattactccaaatatctggcttcctagaactttgagcttagctttagggagtgtggtgtttgattcaatatctttatatataaagggtatgggcatcattttttgactctacttcctgcttgggaggggagcatcatgcctttggggtctagagtgtgataaggaaggacacctgactgcttatctcagaaatatctctactcagaaatatgcaacagaagctgtggcgcctgcctttaatcccatcactccataggcagaggctggtggatataggagttcaaggacagcttgatctacagagctaattctaggacagccagggctaaatatggaaatgctgtctcataaacaaaaccaaaaagcaaaaaatcacctgtatatacgaggcacattggtttccagttattccattaaacagttgtacttgaatggaccgtgagaagacaattgatttagtctgtggtactggttttatgagtttcactaatgctgtttatctttcattgtgagtttctattgctctgtagtgtcctgaatcattttatcctacttctgtatgatgtgtcatgagaatcaactcattgtcttattgaaaacccatcaaaaataatttgtgtctcattgcatttttgtaggattatattttcaatatcttagactgtgtcaccttactgtcatgagtagatttgatgtctgggtaactttttgctatacgctgttcattcatggattgatttttgttttttaagcttcctcatttactctccttttgtgacttccattatgtaccctaactatagaattcttctaagacactttaattttttgtacaatgcttaagacttattacgagtgttatttgctatatatgttggattataacttatattttaccaataattgtctttttgtgataattgatactgaagattttccatttgagcgtctttgagatgagaatacatagttccgtgcagccctttcttctacctagagtgttttgtggttaaatgtgcttaggctttaacccaggaccttgcacatgctgggcaagtcctgctcttgtacaccttaatcttttttttgtttgtttggtttttgtttttttttgttttgttttgttttgttttgttttgttttgtttttcgagacagtgtttctctgtatagccctggctgtcctggaactcactctgtagaccaggctggccttgaactcagaaatccacctgcctctgcctcccgagtgctgggattaaaggcgtgcaccaccacccccggcctgtacaccttaatcttgaaaatcaactttaatccttaaccgctttgatggtccccattttctagtaaaactttgtttctccacttgatatgttcccatttaatgatcaccacaacagccttctgatgcattccagtgaggttttaaaggcaattatctaacacctaagcacaatcataaaaattctgtgcaccaggaagactatagtctacccttgcatatctaatatatatgtagaaaacaagcgcaggaactctgggtatgtgggatagagcattttggaggatgttcctgttgcctgctcatggtagagcatgtccccaacatgtgtgttacaaagggcttaatctctagcacaaaaaaaacaggcaatattattcacttctacattttgtttttggaatagctgacaatgaaaattacaaacagtattttataaacataatctgtaaatgggaaaatcacatcaaggatacattccctttgtctaccttgaaatgatccaaggccagccttgtctacaaagccagttcctgaacagccagggctacatcgagcaaccctgtctcaacagggtaaacaaggaatgaaagaaagattgatagtctcttactatgttaggtaatgtagcttttatgcaaactttaatcagtggttctgaaggcttaagttttcagtaacatattgttggagaaatttgtatccagacatccttattggccttgaattcgtttaaaggtattttctgctccttgtctaagggactgccagaaaatgggttatactgcaaggttgtgtttagttgagtatggatgagaattgggctcaagacactggagctgctgttcatcttcctacttggctcagagacatgacgatttataccagattgtctgtccattttaaacttctaactatgaatatagatacaccttaagggtcttcaatttcaaggtgcttattaccctataatcttaaaccccaggctaagattatttattgataatgctgccaacaaatgtcttttaactcatgagtaacttttgtcggggctacaaggggttttttaagagtctgtttccctctcagatcactttttcatgttgatctaaatgtttgtccacagttcaaatcatttattattattattattcagttctctcagtagtcaggatattgaattagtcccaaagatgagagatattcaggtatatagattaaaccttacaggctgactagttactcgctaagaggtttggggtaggatatatggaggagagttttacagggaaggaattttttgtcatggatagctgccatcctctcattccttagatatacatttagtttcttctccatagaagagccgtatctaggaactgccaatcctcagtaagacacggagatagcagcggtgccccatcattctcatctgaatagtctcttgtcactggcaggctttctcctgaactttatttttcttttgaagtgtttagagacttgaaatgttcattgctttactttgaagcatcagatatgtgtaatatccactctagggtttctgatctcaaagcattataaagcgaggcatgttggcacatgcctagaatcccagcatttcgggtccttatacaggaagaccatcttgactttgagtccagtctgggtttcataacaagtccctgactgaaacaaacaacaaaatctatgaacatgttttctactcagacctatcgtattgatctttactattcaaataatgcatttataatgaggacaattttacttaagtaaatggttcagatttgggaaaggaagctctgaagtgtgcatgcaaacagtgactctagggtttgggcataggcattagctggcctgtttgttaattgcgtccactcaatgctatcttagttattgttgctgttaatgatggagcgggcaatgcaagaattaaaagaagaaagttaattattattataccttttgaatggtcaatggtgttgtggggagggatcatggacgtttttaatgattcactaatgtgaagttagcccatgtaggaaactcgatgattcttccattcatgctcttgattagtaatctattgcctttcttctttgttctaagttaaaagcttttgaaaacttgtgttatagctgaataaaggtttttgtataaacacagaaaaggatgtttggggaatggtcacagttgacctgaagccgaattctaactgataactagctatgttagttcttgtgactgtcatccctggagagcaagaaacaacagctggccttggtgatcaggagaacttcatggatcgcgcagcaacctggagtggtgttcctctgaagaaatcctactcgggtggatataatacaacctgctaagtgttctagcacttagcaggttgtattatcattgtccgaggttatggctctcgtctatcaaactaatccgtaagggcaaggatggtgactttgtactcacagtgcctaatccggtgcacattgtaggcctcattaaatgtttgttgaatgaaaaaatgaatcatcaacagacattaattgggcgcctgctctgtgatctccatgggctcagcttgttcctgccagtggccttcaacgttcaagctctccgcagcgtccttatttctgcagctcattcctgtgttctgtgtagtataatcatagtggatatattttacctttcaaaccaattccaattgattgataattgtgcctcgactgtgttttataaaaaggattccatatctggttcttttctatcctgagggtgtggaaggaagggataatagctcatgtaccataaatgtgatattttctatgaaatactgtatttatgcctgtgttttggaaatgcctgcttgtcattgttgcatctctgttgttgttactataatcgctaccgattactccctaggttggactacagtgatcactgagtaggagcttcgtctttaaaatctggggtgtgctgttatggttggtattcattttcctttacccgctttccccatacctccatttataattttattgctgctcatagctccagaaggatatagtaacagagcaggcatggcctcagtgtggtaagctaagtgagaacaggaagtggaaccagggtagaaaaccccagtcttgcccctagtgacacacctcaagcaaggttctccttctgaaaggtcccattacattcccaaatgtagccaccacctgggatatgagtgttcaaatacatgaggtagggccacggtgttccttcaaagcaccacagagggcagaatgtacaccctgctagaatagctttctatgaaaggatccatctcttcactggagcaggcagacatatgaagaagacaacttggagtggtcgtgaaaggatttgaggtttggcatggactctaagaagcacgagatttgtggttttccttctttgtttcttgctaggtagtcctggctgtctagtaactacctacaaagatcaaggagaccccaatcttgtagcaatcctgctgctgcctcacaattgttaggattatagacatgggcacatgttcattagaaagttgcactgttctctaattcatcttttaagataaactatagagggatgaagattagcatgttacaccaccacagatagaaaccattctagtatcacgaaacatccaactcatgtagaatttccattcgctgtttgggatgatagagagatggaattgagtttttagaaggtaaaccacacaagagagtctagggaactgacagagcctggctggactgcacagttcgtcctcaaacgactttttactgacccagctcctgaggaaaggaccctggtgtctgaacttcaacgctgatttaataatcattgttttcatgactggtcctttagaaatctggcctgctttatatttgcccctggggcttagacaagggagaaaaatggaaaatactgtccgaggtaaccacagccacacagaacctcatacaccaagtggttagccttatcatagagcacaggtgcctgttctcagtcacatgctagccctgtcttaggattttgtttacattaaccattctatttcacagtattaatgtccttatacacaagatacacagaaatctttgttgtgttagacatcaacaatgaaaaatccctcaggcccaaatatcagaagatagcacgaaaataccaagtcagaacgaagagggtggccagtggatttgaaggtagatgcagactttatcatggttactcctacaatacagaacattcttgtttattagtctgataccagccatctgatgtcatgttggcaactagagaagctttatataagaacaggagctctgtaagaaaatattgtaggaattaggctttataagacaatcgtggcccttggcagtcttggttaagtctcttaggatggttagggtagaacttaggtgtgaaaagtcttgactttcaattattctacattgaattcccagaacacctgagtcaagctttattgtgtttattacccttggtcttgcctcctcattcttgtgtggactccttaactcctgcctctctttacccaacccaaatgtgtttcagcaatcttctttccctgcccagtactggatctgtgaaaagctgaatcatgaatcagtgagtgtgcggattggaacccaagttgctctctggatagaacgaaaggagtcgtgccccaagaagatggagagggaagttatgaaatgctgtgaccaaataacaaatgctgatgtttggggagataactgtttcccataggaaatagagtgaatgcgatgtctttcttttgtgagggattcatagaccgcttctcaacgcttgttacatgttactccttttttcgagatttttatttacctaactgggaaagaaaccagaacaaggttttcattgaattctgatacaggtatttaaagacttacggacaagatatagaagaagaagtggtaattaactgattaaagaagtacagtttatatccagtagacagacaggctccagacatccttagtgctgtcttagcatcaaaggttaatctacctaatacttgtcatcctgaaatgcatggtggaacatccaacagacaagagctacttcagggaaggactatgatttttgtcgtggaagacatttaacacagggcagctcctgtgcacttacatgatagatattgctcttccggggactctgaatgctcatcccactttcagctcactaggcacatcgaactagaaattttatcatctcgtgaattagtccaatacctgaaggagcaagagaaccaacacccagttgacaagaatatgacctgttgattgaagaccattaagaaagtaacttgattcagttggactggacttttttattctattgaaaaaggaatttatttcccctcagtgaacgtaacatgatcaacattttgaaagttgtgaacatgcatagttctataatttacaaaataattataaaaatctgagtatggatgcagcataatttcagaacagaatagccatcatactttttatatatcttaaattcgagttttcaagagtatatttctatgttatatcctttgattagtacaatataaaatctacatctaatatgtacttcaggttttattagatcatgccatattactgtacaatttggacttttccatttttatataaaatgtaacatgcattgtacattaatatttatatatcttgtttatttatatatctttagaattaatttctgccaattattttctttatttgaatacttggggtatcataaaggtgctgttgaggtattctcaatatgcttgtacaacttcctgcctgtagttaataaatgtggatatttcattaaacaattgaaatataacattttgatggtatctgattgtagttctatagattgtaaaatatatgtagttgcatatcttcagtccatgcagactgtttttgtggctgggggttgtttcctggagagggtgtgttgccttgccttttcttgagttgtgtatgtgccatcatgccgagcagttggaagtcttctaaattcagtcactttttacccctttgcgtgggaacgactaatttgattgatatacatagctaatattttgacttctagaaagtgaaatccgtagaatcatatgtaatgtttagagtttggagtctggctgctctcacttcctaaatgtaattgagatttacccatgcagatgggcattagaccattctgtagttatttaacgtggaatatttctgcttctgacagttacaagcaaagttcataggtaattttaggtataattgtccttagctctgtgtatgagtcaatatgattatagtagccagacactagaggtatccgatttcgcctggacctggtgttacaggcatttgtcagctgcccaacatgggtgagtttccttttcttttggtgtttaattcttcccaccttccaaatattaattctgtcagaagatctgccattctttcctttgctgcgcactgtactttcatgtgatcccatttatcagactttgctattatttcttaagctgttgtagtcttttgaagaattattgcctatgctattaattcaaagtattctccattttcctatatgagtttgtggctttattttaaggtgttttatccatttttttatccatgggaacttttgttgaaagcagggagacatgtccagtgtttacaactgagctctctgccattggctcccactttggtaagggagctgaatgatggctatggctttcaaatatatgagatagatgcccgtggtacctaatatggcaattcaccgaattcaaggtacaaaggaaggccatctgaaagtgataggaccagtgagcgttcctactaagtctcagaattattaccctcccccaccaccacccccgcaaacaaacaaaaatccctgtggtaaaggccccaaggcatgggattgtttcccagtgagaatgcataagcacaatagtttgtcagtattgacccaggagtagaggctgaattcaccattgcacatgcctatgtcagctattttaataaacttattcaggtaagtggctggagcgatggctcaggagcctttggttggattcccagcaccctattttgccttctgcatggaatatgcgcatacatggtatagagacacagagacatgcaggtagaacatctatgtgcataaaacactaccaatcatgctaatagtttttaaaaggaggttttctgcgacatccatgttaggtgtctatgcagtgtagtctgaagtgtgatgttggtgttattcgttggtctgaggattgctttggctctttgcatacgaattgcaatattttacgctagttatctgatgaatatcattcaaatttgcacttaatttgtagatcacatcaattaatatgacttattctatgtttagtgttgggcagtgtctagtgtattaatctgcttcacagttttcatttctgagatcttggttacatttatttatacttgtttaatatttataaatctcttatgcatggaattttttttagtatagaatagagtttatttacaacatgggaagggagttgaggctgtagagacaaagaaaggcagagtgagagacagtttatttacaacatgggaagggagttgaggctgtagagacaaagaaaggcagagtgagagacgggggacggggggtggggaagaagtagaggccgtccatgagcactaggagagagagcaagagggcaagcatgaatgtttaatattacttacagagaagctgcaggtggcaatggtttgtgcctcatttctgtagctaagaattcaaaactatattgactaaataatatgagggcggggcagccctatgtcattcctcattgctgagaaaagtttcaggtagacaccattcatcattgtgttgtctctgcattgagtatagcacttatactcagataatattcttcttaaagcattgtcagcatctattaagatgatcatgtgatttctgaccttgattctgtgtatgtaaaatatttcatttttttgtattatgaaaccatcttttaaatgaaaccagtttactatgctctgttgtcttttcattgtgttcttgaatttagtttgcaagtattttattgaggatttatgttaatcaaggacaaaatattttgcatattcacagaatgtgcttggatgaagtcctttctgttatatggtagaattcagcagtgagtattatgtggtcctgagcttttcttcatttggaagacataccctggatgagtggttgtctagcattcaatgatgtgtcatcattgtacaaacctgtatccccagcactctgagaagaacactagaaagaatagcagttcagagtcgttctcaagttcatagccagttgaagccttgaatatatgtcacctgttcttaaaaactttgggtgtgtgagtgtgtttgtctgtgtctctgtggtgtgggtgtgggtgtgtaccccgagaattgcaaatttcagtcataggtgaaaaaacaattttggtggtcaaagggaaataatgtatttatgttctacatttattatttcccattaactagtagatttggacataatttgttcctttgtccaattccatgaggtatacagtttgctttagcattcttttttgatgttgtagtttattgctataagcttcccttttagaatccccttccctttgtttcaaagcctgaaatgtgttgtgtttacattttgatttgtctccagatagtttttgcttcccttttgattgcttctgtgacccactgattgttcaggggtatgttgtgtcatttccttgtatttgtaaaatttccaaacaccttcctgttatgatttcttatttcatcactttaaggtcagaggtattactttaaattatttcaatctttctaaatttgtcgtggctgtgggtggccttgaattcgagctgcagcaatttttgtatgtgcttgataaggtgtatgttgttttagtgatggaatgttctggatgctttcagttcatttgcacttgcattttttctttcggtatttccttgctaatttcctgcctctgccctatgcactgttgaaagtgacatctacttgctttgtgtgcttacatcttcttgggagcacaggcatttactacatcctgattggcttcttcttagaagatatgacttagcatatctccttgcttgtatttaccatttatatcaagtatcttttttgattcccacatcttcagcatatatataccctcaaatagttatatttaatataattgtcaataaaactttacttttatttttttctaagattcacttgtttctcgttgtttctctctgttttagttgttgttgttgttattggtttttaaccctgggctaccctgaaattcactatgtagctcacttgaacgtaaacttctaacacatgtcctgtcttagggtcccaagaactccctgcccccagaatctctccaccctggtgtacatgcttaaaaatgcagatattaatgctggacataagggtctaggtgtggattctctagtcattgaacacagcctgtgaacaaagctcctaagatgctcagacaaccttacagagttcattgcagattcaccaatgcatgagattgccctgccacaatgagaaaatcctcactgaaaagcagaaattcataggaataaattcagcacaaaataaatgcagataaaagttatttttttaatgagagagaaagcccagatggctgagaacttaaatgttcaacatgcttagtcaccacagaaatgcaaatcagaatggctaagatcaaaaactcgagtgacagtacatgctgttgaggatgtggagaaaggggaacactgctccgttgctggtgagattgtaaatttgtgcagccactctggaaaatctgtctggtggttcctcagaaaagtgaaaatagttccacctgaagtcccagctactgggcatatatccaaaagatgccccagaatacactaaggaaacatgttccactatagtcatagcaacgtcatttggtagcttcgggttctatgttctgacagtccaaatatattgtggactcccaggctgcattttcgtaatctcaataggagcattctctgtagaggtccacattttctccacacgctggaagtgtccctaaggagaaggctctgtcatttctccatgggtctgaggctgtggtcattgatctgctgttttggtggcaaccttcagtgccagcagtgcacatgaacttggaacttcacttaaggccttccctggtctccacagagctacattcatattccaggttttttgttgttgttaggttttgttttcttgttcttctttcttctctgacggtataatttcaactgaacttcaagtcaaatgaccaagcgtactgttgaaggtttcctgttgagttaacattgtcataattcatttgctgttctgatttttgaacttttcatttgatttatgacaaggcacgctctagatgccctagctaattttccctctgttaacttactgtagggaaaatgtttgttttaggttccattaattaattgcttctgtgaaccccccttgctgcatagcaaggggctatgatgtggacgttgccttcggaaaccctgtgctgtgaacattcactcaaaatccaaattcctacgtgtgctgccagccaacttgatataaagacattctattggctatgaactgtgtctgactgatcatctgggtgggggctccccatcatagagtcaagtattgttttcttgatttcattattttctctgtcttcctgcagctggctgagctttttaaagatggctattctgaattcttcacaggtaatgcacaaacctgcatattctaagggttctgggagtttattttgtgactgatagtttcatgtttttcctgactttgttcttgtagccctgcatgggcaactgtccatttggagaaggagcctcctcttgcaatctttacagatattttttggcgcaggaaaaaagaattaaaagccttaaaaaacgatttctaggaataggagctgtaatggacccacaagatggctcccaaccatctgtaactccacagtcaagtaacttgatgcagcttttgacttttacattcacctatacaaatgtggtgcacatgcatattacactaacatatgcaaacacagaaaacagaaaattttaaagattttctgaaatgtgtcaagctttgcctgtgtgttgtgtgtgtgtgtgtgtgtgtgtccatgtccttcacgcctttccactgtgggaaaatgtaatcttgtcatttgccaatcgcacattccctttctaggtgttttgtgccaggtcgctgcactgcgatgaaaagatgatgacgcaagtttctctcattctcttcctccagatggcacagtgtcagaatcgtgtgtggcctcctgctgcctgaaccatgccgctaagacagttgcccactgtgcagcttcacaccatctgcagagagcaacactgcagagcctttgggagagccttgccagtcgctgaaagcctggctgactgccaagccttgcactgtagactgaaaattgctctctttgctgagctcagtactaacacttagatcttcatggtctcctgggagaccatgtcagctgctgttcagtgagataaatttggatcagctgaagatatgcactctctatgccttccttgactgtcagctaaacagtgtgcactcctggcttagtacagccttggctgctgagagccccattcctcccctgtgctcttcattgtcctcatgatctggctttcatcatccattatactcctaacactgggagtgaagtgtcattgaagaatgttcatcaggcactacctcaaagggctggagatgattggtgaatgctttgattcttcattcctcctaggacacatatcaagcccccagaatttctctctatccagttgcaccagtgtgaggaacttgacggtgtcaggaaagtgaaactgcttctctgctccatataaatgtctgtgcagatgcaaagccatgcattacatggtagctcacctttaatcctagcactcaggagacagaggcaggaggatctctccgagctcaaggccagcctggtcttcacagtgagttccaggacagccaaggctacacaggaatcctgtgtacaggtccttggtattgcactcctctctataaacacaacttgcttttagaatgtgtggttgttaagttgttctgtgaaggatggataaaggctagctcactactacacccgtcagcttgctcctgtcacttcttctcacctttgagcacttagcatccctctccgtgttgtctttgctgaaatgcttgctaaggcgaagctcctctgtagctgtcctctagccccagccaagattctttcaagatttttctttggccttctgtaatttgaatatgatgaatgtttttatttactacttcattttgtattttgaatcttttttaaaccatgccaggttctctaggctcctggttctgatatgaattgagcgattatcttaggcccttgtgtttcaaatctttctttctttctttctttctttcttccttccttccttcttttcttttcttttcttttcttttttttttttgagacagggtttctctgtatagctctggctgtcctgtaactcacccggtagatcaggctgtccttgaactcagaaatccgcctgcctctgcctcccaagtgctggaattaaagtcatgtgccaccactgcccggcttactcaaatatttccttttttttttcagtcctctctagtgatctcattatacatgtgtatattctctagttgtcccagttatatgatgttcttctctctctctctctcttccccccaccctgtgtgtgtgtgcgcgtgcatgcgcgcgtgcatgtacccaaggaaactagaaaaggacttcaactccttgacgaaggaggtacaagcatttgtcagccacctgatacaggtagcagaatctaaactctgatccacattattaagcagcaagtgctgttacctgctaaactatctcgctgaaatttatctcttagaaagtttctaatatattatcactgtcagggattctttggcttggttcagtctgctaataagcttaggaaaggcaattttcattttgttgcaatatttttgatctgtagcttttgttgttattcttgttcatttttcaaaccagggtttctccacggctatactggaactctctgtagactaggctggcctcaaactctcaaatatctcactgcctctgcctcccatgttctgggattatatccctccactgcccaacagcatttattttattcttaagatttgtttttccctgctcgtttgtttgtttgtctgtttgtttggtatggtcatttgtttgtttgttttgatgtatttgaacttgctatctttatgtgaggataagcctaagtgtgtaatatttctgtactcatctcccaaatgctgaaatgtagacacgaaccaccacacactaggtttgtttggttttcttttgcatgcatttattgtattgtgtacagtactggtaccaaaggagtccatcacattctctagaacttgaattacagatggttgtgagttgtcacatggtgctgagaattaaacttgatcttcttcttttttaaatttaaatttcttcacttacatttaaaatgctatctgaaaagtcccccattacccccccccctcactcccctacctacccactcccactacttggccccggtgttccctgtactggggcatataaagtttgcaagaccaaggagcctctcttcccaatgatggccgactaggccatcttctacatatgcaactagagacacaagctctggggtactggttagttcataatgttattccacctatagggttgcagaccccttcagctccttgggtacttgctctagctcctccattggggaccctgtgttctaaacttgatcttctgaagagtaaccactattgattttaactgctaagtcatgtctccagtcccaaaagaggtttttttgtttgtttgtttttcattactgtgatgatcctataatgaagaagagaatgctggtggtttgtttatgtgtttgtttgttttttgagacagggtttcactgtgtgtccttggctgccctggaatttaagcatcagactggccttgatctcacagagatctgcctacttttgcgctgagattaaaggtctgcactaacacctcccagccagatgtctctttaacagactgactttacttcctcacgagtattatgatggtttcttcctgtcctgtgaggaatgctattgatttggggtttggtttgtggaatttttgttttctggttttttgtaatttttcccccctaaatatcatgctgtcttattctttggttaatttttttttgccatgttttcatttattatgagattggggacacagcatagaatacatgacaggattagagaagagcttgtaggggtctgctctttttctaccaattaggtacagggatcagtgtcaggtgtgacatagaactgaacttgaagtatcagaccaagaaaagcaatacacgttccatcctacccatgaggttgtaagagttgaaatattttttgataccagtgaattagaactgaccatcattttctagagctaccttagcttcaatctctgtcaaagccacaaagatttcatagctgatgttcttcaatgttcccagctaccagctcagtgcagtcagaacacgtattccttcactaatgcgtaatccatttagccaaaacttaaatgtagtcctctctttttttctttttcttcttcttcttcttctttttttttttttttttttttttgttttttttgttttgttttgtttgtttttcgagacagggtttctctgtgtagccctggctgtcctggaactcactctgtagaccaggctgacctcaaacttagaaatccacctgcctctgcccgagtgctgggattaaaggcgtgtgccaccaccgcctggcttccagatgttttctgaacattaatcaccagaagatttgggaaacaactgcttaatgtgaggtttatataaggcatctgacaatgaaaaaggaaatacgaagaaacttgactacagtttcctttagcacttttagcacaatatcaaaggactttaggaagtccaatcaatgttctagaagttttgtgagatcagaatcacaggaaagtcaacagatacaagattaataaaaggaagaaagagtgaaaatatgtctttgcccaataataattttagaagtaaatatagtaccaatgtccattaagtagacacaaaattgccataaatggtatcaaagagtggaatcatgatccagtcttagctatgttgctcagtttgtagtcttttttctagtatatatgatgcctgagattcaatctgcatcattgcgtaaaataaccactccgtataaccagaaccccataaaattgatagtggtgggacacacctgtaatttccgaactccggagaggtatacacaagaatgccagaagagaaattcaagataattcttgtctacatagctattttgaagccaatctatcctacatgagtatttgcctcaaaaaaaaaggtgtattccttatttagaatttattctgttcatttgttgactttttaggtgtgtgttttgttttgttttgttttgtttgtgaatgggtgactgttagggacaagctggccccaaacttctaagctgtgatatgacaggacagcagaagccatggggtagaggtttgacctaggagacaagatgtgtttgctgcaaagggtagagccagaaatgtggatgaggccctgcggctcccagagggttgtacacatcaagcatcgcatgtttggcattgctgaaatgtttgttttcttgctttgattctttgttcttcccttttggaatagaaatatgtgcctctttcttttttaattttcaggagccacagttcgcttattttaagagatatcttgggaatatacaaacagacatatctataatagttctatctataatagttctatctataatagttctataacatgagcttgtaggcaagactatgagacattttcttgtttattgattgatgtggaaggacctaatgagtggtgctatgctagtcaggtaggactatatggtatgataatgactgttttctcgaagtgtaaaatgaaatcaagccattcatcctcaatttggttttggtcatggtattttcttacattattagaaaccctaattgagccgggcgtggtggcgcacgcctttaatcccagcactcgggaggcagaggcaggcggatttctgagttcgaggccagcctggtctacagagtgagttccaggacagccagggctatacagagaaaccctgtctcgaaaaaccaaaaaaaaaaaaaaaaaaaaaaaaaaaaaagaaaccctaattgaaacacccactaaaccatcttgccagccctgaccttaagtttctaatcctgcctcgtccttattgatactagaattaccacacatggttcataccatacttgggatcaaacccaggggtcatgcctggtaagcaagcactgtttctactaagctacactgcctgcccctaaagtattgtttataagcctttataagtattatttattaacctcacacttaaaatgctaagataccgtactgtgtatctgtttcctcgtgtaggaatctaaaagtgaacatatgaggctcgaattgggaagccacccaagcatgaatatgatttaccaggctatcgggccttgccatggctaccctctacacatggtagagagcatgctcagcctctgcctgttgtccctcatcttcaccactgctgcggtgataaccaggaagccaagagctagtccggccttgcaggccatgataaagccactgcaccttagaagttatcatggtccaactaaaaaatgccaaaaacaaatgggatgtttctctgcagtatcctcctaatattacaatgaagtttgaaaaggtatatggagacccaggcagtggtggcgcacacctttaatcctagcactcaagaggcagaggcaggcagatttctgagttcgaggccagcctggtctacagagtaagttccaggacagccagggctacacagagaaaccctgtctcgtaaaactaaaaaaagaaaaaaaaaaaagaaagaaagaaagaaagaaagaaagaaagaaagaaagaaagaaaaggtatatggcagctgagggaacctagccattagtcttttattccactgtggaatttcatttattttgttcccttgtagctgatgagttttaagcacctaaaacaaggtacctttccttcccacccccaaactgaagactttcttagaagcagggcatgcacaagaaattcctgacgttactaccttcctatcttcacagtttaaaagaataaaggaaatggctgccgaagaggtggcctaaatcctagcatggcctgcccacaggcaagctgtgactgatgctgcggcaggtttacagtctccctctgtgacttgtggcacattctagccctgtggctgagtctcatgccaggatggctcagctccaaggcaaagccccatagtgttcattgaagtctctcacccactttgctttctgggatgggcatggatggtggcagttctttcccacctaataggaaaaagcgactgccaagtaagtaacccaggccctttgtctagattatcccttgcttaggcagaaccaacaaaagtttatactttaggtttttcaaattagggtttttctgtgtaaccgatatcatcctagaacgcactatgtagaccagggtggacctgagatcctgagttaatcccagatgtcttgtgctgggattaaaggcatacacctcggtgcccagctggacagattcttatgactaatcatttcttctttctgcccaaacccaaacaggccccagagtgacaagtccagccacccccactccttctttcctgtccacggatgtttaagcagagagagggaggaaggacaaagcaagtttaaaatggaaactaaaagggggaagacaaaaaggaatgggatagtggtgaataatcaaagaataaatacagccaagcagggtggccaactctactcactgcccttgagcccatttgctggaagcattagggttgacagcaacattgaagaaaacaactgtgtgcaaaggacacagtgaaatcaaaaacaaaaacatgaacaatgccattccatgcttagagggaattattttgttgtagataaaaggctgagaatagcaaaaagcagctgggggactctcctggcctaaagtgggggagaaggaaactggctgttgccagggttttgagagtagagaagattagctggaagagcctggaactagtgcagggcttaaaactgctagcggtttgactgaattccggaggttgcagtgaggaaggagcagataagagggtaatggcttttcctggcaaacaaagcaatttcgaaaggttactgaggaatgtggggtgtttactgactgggtcaaagtccagtctgagctgaggataagaaggttcggacctgaaatccactatagcagttgaaagcaacatgtctgtgattttctggggctattgtgggtctgtatgctgtcggtaaagtaacttcttcccatgcaaaactaataagatgctaggcaaggagccatcatctttttaaggtattgtttgataaagagtacagctcttctgctcgacatataaaacagagagaagtggaagaatccctcttttatttaagtgtacccaaggggtagaatctcctcatgcaacaccccctggagtctccagatgtggaggtctgtggaccatagcaggagctttctccaatgtccaggcaatggtccgagtccaggattctgtgcagttgtttgagcagccttccaagctccttccagtgtctgcagaaagttgctgaggaatagggtgcatctggcacaacttcaggctgaacaaacctggcatgtatatggtgctcaaagttcccatcacccacaagggagaaagattgccgtgcgcttctgctgtggtacacagaggaaagaacttgcctgtgtttctgtgagctccctatagtccagggagcttctctcagggtttagctgtgtgtgtggggggggggggggttgtgtgtgtgtgtgtgtttccatgcctcagaagcaagagctctgtttctccttttcatccctaggctttggaaaagtgcaccaccttggtgtatgtacatggcgctggctgcctgtgcctttgctcttgttccacatcccactccttccttccctggtaccagtgcctctctctgatgagctgatgaaagctttaatccctagctctcctctgtgtggaggcttcccctttgagggaggcagagcagctgcattcagcctggctggggagctgccagctgcagctcctgctctggcctctgctggtggctgcagtgtctcctcagagggtccctcccctcaggcctgtctccgctcctgtattgtgctcctgctcttaggcagcagtactgaaaagcctcatggcacaggcagaaggcctgcccctcccccgccccagccagacctagcttttcttcctaggcagggatgtgacaaaaggcttcatcttcatgcctgctctggctctgtcaccagcacaggccaggaggctgtctgctgggtggagatgctgcctttgagtatgtgtgttaggggctggggcagggagacagttatcatccagaaacccagatgtggagctggacaaccaggacatgaggggcagtgggcctacctaggggcttacaggccagccccagcaatacagaggaccccgtagtcaggaaggagaagccaccacagagaaaaaagtaaaagaaatactgccttggcacatactgttcctcctcccctactcagaagctgtgagacgggctccttccttttttagttggccctcctactgaaacagtgttgttcctgttctgagggacagactgaaatcagtgcaacaagcagccttccttagggctctgagtgcaagtgtcagtgagagtgtgtgcaggaactctccactgcagcttttttttttttttttttttttttttcagtgcaacaagcagcctttgtgtctatccagagcctcatgctgaaagatactgtagcagccaggtatctgtgtctttgtccccacattcttttcagggctgatgctcagaagtgaggtgcctctcccccacttgggtggactcagaagacagaggattagacaaaacctttctctctctctctctctctctctctctctctctcatattgtactttgtgtgcatgaaggtaaggaatcacgtcagcttgtggtcatttttctctttccaccacatgtgtcctggatattgaattctattcatcaggcttggtagcaggtcacaagtcccattacccactgagccatctcacttgtcctaaacaaagaggacattagagccttaacagtgagcagagtttctccttctactttttggacttgcatggaagctgggacttgaacagaaaagatcccccataagagcgtgttccagcgtccgtgctccagttgctggtgctgttggtgaaggttgtggccaatccttggaaggcctgagtcaatgtgtgttgctgacttggacaccgccatgtcaaggagcataggctcagccccatgcagtggccaggtgccctccccatcctcatgcaggtcagaggaatgctaaagtcttccttagggctctgagtgcaagtgtcagtgagagtgtgtgcaggaactctccactgcagctttctccccctgagtacttatggcctgaagactggtgccctacagacactgtgcctactgaaactagatcaacctctcttcctgatcagctgtataccacaattcctacctccttgcttatcaccaggcaataacccaccaccccattggactctacataataaatgtgctgtccttccaggctgctgtggtttctccatcagtatcctgttcacccaactccagcttgcctgtgtgtcctcttgtctatttattccctgactccccccctccccaaatcaggtcagtccttaaagccatgtaaggatgtgacagaaggttatggaatcttttggaggtggcatctttagaggggacagaaatctcttggagagagtgctttaaggttttatagtctggccccatttcctgtttcctttgcttcctgtgttgggagaaactgtgatttgctggcttcctgatagccagggcaaaaagcaaggtgctcctttagaaatgcacaaagacaaaagagcaattgggagagattataagagtgttcaagtacaaagggaagacagtgtgaagccagatcctctctatggtcacagcaggacccaacctttcttatgctttagcctcagatgactggcctacagaactgtgtgaaaggaaatgttatttgatcgtgtgtttgatggtcttgcagatcaatctctagcttcaatagtgttccggttaaaaaaaagaaaaaagccagggagcaacagaggagtagtagggtccgcctttgataccaatactccgaaggcagaggcaggcagagctctgtgagtttgacgatgccagcctggtctacagagtgagttacatgacagccagggctacacagagaaaccctgccttgagaaacaacaaatcagagagcagagccttcctcattcttccactctagtttcaagagggaactccttgaaccatcttcttggtcacctatttcctgcaccagctaacatgcgttttgtgtgtctatggttggtcaattcctttgctggcctaccaggggcttccacacccatagcaattgtctaaccaaggcatggttctgatggagaagaaggtacttctgggaggtggctaaggagcataaaggcagtactctgttctacaatgtgtaggagccattttaagatgaatacggtaaaactctgagtgccatgcttaaaaaactttgagaagagcataaatctgttcgtttctggatgatggaacctagagctctgtctcacacagagctcaatctttatggattcctctatatttaagtcttaggttagggaaaagtcaagaaaatggccataaggattggagagatgcctcagtagctgtgagcactggctgctcttccagatgacctagtttgaattctaggcacccccatggcagctaataagcatttacaactccagttctaagggctctaacccctcttctggcctcagctgacacttgtatacatgtggtgcacagcatatatgcatataaaacatacgacacattggaggggttgggggagggaaggctctcacgggaccagccgccataggcttcctggttcccaggcctactcttcctcaatagcttgtcttcacgaatgatgttctggaggtatcacatctcctggtgagacggtcagttttcctgtagggttcatgtcttgcttccacctacatgattggtgtaaggtgagagtaaaggctaagatgaggatggggagggacttcatttggcattccagagtaactattcaaatgggaaaatagaaaccttacgattctcagtgactgcaggatgccaaccaagagcctttgggatgtgagccatgaacccaaccaaaacccatagatggtagggtatgacaacggtcttctgaaggagtctactgggagcaggccgagggtgaatggcagaggcggtgggtgttaagtttctggggcagcttaaagacaggaagcagaaaaagagacccatctgacctcataagatggggccatttatttcaactattgaaggaaatatccagagtaaggaaggggtgtcttcgaaagagcgaggtatacttgagtttatacttgagtttttacttgaggtttgagaagtactactggatctatagcagttgcaagcctgaagtttctccctcctggagttgtttgtccagacaaggctgttttatctttaaaaactcccttggccctgcctattagaatgggggtcatggccgggcatggcagcgcacacctttaatcccagcacttgggaggcagaggcaggcagatttctgagttcaaggccatcctggtctacaaagtaagtgccaggacagccagggctacacagagaaaccctgtcccgaaaaaacaaaacaaaacaaaagaatgggggtcataatgggcactgagtttggcgatgatggggaagagctagagtttcaatatagggctttttggtcagggactagcaatgtttttgcttgttaacaagtgttaacaacaaaggcttgttaacagtgtttcaaggcaggaaggagtttcctggtgaagcaagtctctggtacaaatgatggaattcttaaagcaagaacgaatttcccgcctgaagtaagggctgagtgttttagagcagtagtggaaactccagataggggcatgcagcgcggtgtctctagcaggcctccagagctcccagccgctggttgagccagagtctaaagtcttcggaagaacatctagggagtttggccctggaaaaagccagttggctcagagctacactaggaggcagattgcagctgggctgatgaataaggctggcttattggctgtgtgtgtgcgcgcgtgtgcgtgtgcgtgcgcgcacgtgtgcggtgtagtgtggaataaggtccaatgagaagaatggctgtcagctcaggaagtataaaaatagaatgggctttcaatccgagctactgtatgtcccctcttctctctccctcctctgtgttgcaacagaaggaagtgtgagaggggatagaaggagagagaggaggtgaaagctggattttcacatctgttcccacttttggattgcagaaaccagttgtggctgagtgggtgggggagcagatgggggcagtgcaggattgagttttttgttttttgttttaatctctggctgccaactggaagctgcagtcatttgctgcctccaattatacagactgtcagcacagtctgttgcaggctctcttccagaggaggcttcacctccatgagaccccaaacatcactgagcacccctcctatattcgcatcagcacttattcctgagcctctccctccagcgggggcaggttttttgtcaccccaagtcctcctctacacctgaaactgagtgggaataatgagaatgctttttaggaccgggcatgtagcccagatagaagagggctagcatgcacaaagtcctgggttccatccctagcaatgtatatgtaacctgggtgtggtgatgtgtgcctataatagcggcactgagaaggtaggagcaggaacttaagttcatattcattcttgactgcacacacagtcagttcaacgtgtgtacctgggatatgtgagatcctgccttagaataaaatgtgagagaggggagagaaggggagagggagggagagaaaggaggggagaatttgcacaaaataagcaataaaaataaaagataaaagccactggttctgtgatgacttgttatggtagccttggccaatatatccttttggggagatagtagacatttaaacatgtttgaaaacctgacaaggaaagtgtcaggaatttatcctggcttcctaaagacactagatctcaggttgaaggaggtgtacaattcatttaggacacatagacacatggtaggatggggctgggggataaatcaccactaaaattcaaaatttttaaatatattggacttgccgggtgatggtggcacagcctttaatccgagcacttgggaggcagaggcaggcgaatttctgagttcgaggccagcctgatctacaaagtgagttccaggacagccaggctacacagagaaaccctgtctcgaaaaaccaaatatatgtatattggacttaaaatgtgttgccacttttcctgagcagagatgaacacacatcagttcatgccaggtagggcaccgacatcaacagagcggagactcaacccatccaagtctaccgtggcgttgcaatgagttttgggtagggaggggttaataggtgacagctcactgaagctgtatctctggactctctagaacttgcatgtaattttggcaataaatttgaggctctcaagaagagagtagcagttgtttacagtttttataattttggggatggatcttacgaaccttctaatttctgagcttcctgtgttttgtgaaccaccctcttccctctaggacagaatgtttcaattccaaggaatacaacgttacaacgtaatattcagtgtgccaactcaatcccactggaagacactcttaatctaatgccatacttccatgaatttcccaagaagggtagatgtcatcaaaatcatatgcaaattcgaggaagttgactcagcaccctgtgtgcagcacatgaacttctgcattggagtccacagcactcgcttggcgcggagagctatctgtaatcccagcactgggctatggaattggacacgggaggaatcctggagctcagcctagctgaatcagatagagacccaagactccacaactcaaaataataataagaaaaataataataaggtggagctgattgaggaagaaacccacacaaatgtacatatgttagtgactaagcaaagcaggtactttcaaaaacagactccctgttatgtattaaatgtattaatacataaatacatactattaatgtattaaagcttccctttattttctgctaaagccttatggtgcaagcccacaggcatttctgttcatctctggaatctctgatatatgctctgagacttttgagctacacagcaaaaatgtatctactatcttttcctttgaaattgtactctttttttttttttaagatttatttatttattatatgtaagtacactgtagctgtcttcagacactccagaagagggagtcagatctcattacgggtggttgtgagccaccatgtggttgctgggatttgaactctggaccttcggaagagcagtcgggtgctcttacccgctgagccatctcaccagcccttttttttttaagatttatttatttattatagaaattgtactcttaaactgagctaggtctggaatgtattcctaaactcaacctgcttaggaatcagcaatcttctctctgactaggcgtggacccctgagttgagtctgcatgcttctcttgtccatggagcatcactttgggaatgagtgctttaatctctttgcctactgcatggaggtaatagttatcaactttttttgtattttggctttgcatcccccaaaatgtgaacctattgtgtttgattatgcatacaccacagagagagagagagagagagagagagagagagagagagagagatacataatagttgctacaaattgatatattctatcttgaagggaagatcattaacactcaaggagttcgcccatcagtggtgatgcacacctttaattcagcacttgagaggcagaggcaggaggatttctgagttcgaggccagcctggtctacagagtgagttccaggacagccagggctacacagagaaaccctgtctcgaaacgccaaaaagaaaaaagactcgaggagttcaaaagggagtcttattagactcaggaagcccctgaaaactccacagatgtgccatgcccccataaagactacctagggacattcttgagccagccaagctgcctggaagaggcagagagcagccagtctttgatcttccctaacctgtcaagtatgtggtgcagtgaaccatagcatcccagctttcatgaactatcatccatgctggggctttggtgatgcagctgccattgagtcaggcctgatcctatacgtaatcccttgcccatactcctgtaagtaacctcaataaaaccctttgcttcagtaagtaggacttcggtgatatttgtacttgtgcatatatatatatatatatgtgtgtgtgtgtgtgtgtgtgtgtgtgtgtgtgtgtgtgtgtatatatgcaaagctgtttgaacttactaaacaggtaggtagaaaggatatgttatgtacttttgtacatggaagtagcctgaaaggctgttgaaatgagcactgaacaaaactgactgagtacatctgtgagagtcataaaaattattgattatatatgaatggaactggtaatagtatttattgactgctattacagtcttaaggctgtgggcccacctatcaaggtccctcttccaacagccaatacatagccttaaggttataatagagatgtcctttaatttacatttgtcgagaaatgcatgggtgaactaactgtctttctttctttctctctctctttcttcctttctttcttttttctttctttctttttttcttctttctttcaaacattttctttctgtgtagccctcacttgtctggaacttgctgtgtagaccaggctaaccttaaactcatagagatctgcttcagcctcccaactgttgggactgaaggcagaagccacatgcctgacatgggttatcattatatcaagccattttataagtgctaaagacttatgccaacttttataattcatgtgagaacatttatgtgtcacataaacattttactacattaatgttatacctctggaaaatttagtcaaagaaggagctaaaggtcagcttttcaagcacacaattttctatatattatatttagttaccacttaaagatgaggtggatcgaaatagctatagatttcaagagtgtccgggaacaaatatcatttgagcaaagttgtgattagtactgtgacttttgtcacttggaacagcttcacatttgtcatttaacttgtaacgtaccttgtaaagacacaaaagcccgcgaagacctggaatgaagcttggtgaaagagacctttccttgcatttaccacgcccagcatggcataaaaaccaaaaccaaaaaaaaaaaaattaaaaaaccaaacaaagaattcgactatgccctctgtttcttattcggtggtttgctaataaattaatagctaacctgatgtccctattgtgcttgttcaacctggtgtttactcagtagtccaaagttcaaagttctctttccttacctgtggcctagaagctgctttaagctgctttctaattctttacttgtttaaggtctgaagtttccagttctggctgtgtttctaagcagggccacagccttcagaagtagcttccccaaagcagaataatgggccctactccctcctttttgacctatgttttctgcgaattaattttttttctcatctccgtttgtatgttcaccaaccacattcctgtgaatccaggtgacctcatttatgagtggtaacctctctcttgggttcctgtctaccaccttctcagtcagtgaggcctcctctgtaaagttccctaagagcttgcacccttgtttgaaacagacccaccagctcaagtattgtttggaagtcctcctgaacactctgcagaggaaggcattgtccatttctgtagctggcaaccactctggcaggcactctttctatatacttagttggtgaggagaatgtctttggaagaggatgagtctggagaaagttaaacaccattaagaggtagtcatggtagctagagcttgtaatcctaatactcaggagacaaatgcaggattatagcaaattcaatgtaatctttggctacattgtgatttttctggtcagtgggccgccatagaaagaccctgatttttcatgtgtatatatgcaaagagacaccatttaaagttgttggccaaaggacccagatatagctctctcttgtgagactatgccggagcctagcaaacacagaagtggatgatcacagtcagctattggatgggtcacacggcccccaatggaggagctagagaaattacccaaggagctgaagggatctgcaaccctataggtggaacaacaatatgaactaaccagtaccccggagctcttgatgtatcaaaagatggcctagtcggccatcactgcaaagagaggcccattggacttgcaaactttatatgtcccagtacaggggaatgccagggccaaaaagggggagtgggtgggtaggggattgggggtgggtgggtatgggggacctttgggatagcattgaaaatgtaaacgaggaaaatacctaattaaaaaaaaagttgttgaccatacctcattgatagcctagagaaagtatgctttgtcccttcaaagggacagtggcaactggaaagctgaacagagcaggtaaggaagtctgttctttaagattcaagacaacacaaggattatatgtgaagaatgcagtgtgttgtgttttataaaactaaaaaaaaaaaaaagaaagaatatgtatggtggatgtatagtcaggtgtgggggaaggggctgcctttgtgggcccatgctgaggcaccctttactcctgagggaccagccacatatattcaggttatgggaaggggaattgagggagtagagacagagaaaggaagagagagagggagagagagagagagagagagagagagagagagagagagagagagagaagcagaccatgagccaatggagggggggaggggaatgggggacagagaggagagggagcaggaacaaggggtcagagcaatagcaagaaggcaagaaagaagagtatagtgaggagtccggcatctattgccaggtaactgtggggcagagcctagaccaaaaaaagaagaagaagaagaagaagaagaagaagaagaagaagaagaagaagaagaagaagaagaagcagcagctagcacagtgtgtgaccctaatggggatgccagtgtgggtaacctgatgaatgtttgtccaggtacagttgagcaattgttaacattaagctatctgtatatttcatgtatgtggtacattcagaaaagtccattgttacccttctctctctctctctctctctctctctctttctattctatcttttttgttgtttccttttttgttataggatgggggcagtttcaagatagggtgttttctatgtaactctggccatcttagaacttgctgtgtaggcaagactggtctcaaactcacagagatccacctgcctctgcctcctgagtgatgccaccacccaatactatttaaaaattttttggccgggcgtggtggcgcatgcctttaatcccagcacttgggaggcagaggcaggcggatttctgagttcgaggccagcctggactacagagtgagttccaggacagccagggctgcacagagaaaccctgtctcgaaaaaccaaaaaaaaaaaaaaaaaaaaaaaaaaaaaaaaaaaaaaaaaaaatttttgaagcttcacaaattcttttctacataatttagaatgcaaaacatgactttcaagttgcacacaattacataattttctaaaaattaagatgcgccaggcgtggtggcgcacgcctttaatcccagcactcaggaggcagaagcagatggattttttagttcaagaccagcctggtctacaaagtgaactccaggacagccagagctatacagagaaacactgtctcaaaaaaaccaaaataaataaataaataaaatttaagaaaatgcaggttgaggtagaagttagctcatagtaggcagtgttagcattctgtctaagctctaccccacagttacctggcaatagccaggtaggcctgacccactataaaaggggttacttgccccctccttgtcctcttacacttctcttgctctttctctgcttcccttcatccctctttccccatccccgcctcccccgcctccacatgctcatagctggcctctactcctctacttctcttctcttcttctcttctcttctcttctcttctcttctcttctcttctcttctcttctcttctcttctcttctctcctctcctctcctctcctctcctctcctctcctctcctctcctctcctcttctctctctctctctctctctctctctccccctctgactttctctgcctctactaccctcttaactccactccccatgccctaaataaactctattctacactataccatcgtgtctctggtccctcagggagaagggatgccttggcatgggcctgctgagacatccccttcccccacacctcaccacacccccatagaacaaaatcccccttctctttatctttttataaacacatcaggcagtaagaaaaagagcctacggtgaaaactacaaattattctgtgtgttaccgagggaatggatattaaggataaaaggcaatgtaagggttaaaatagcagatctagaagcaccaagaagagacaaagaatgagagagccaaataggtcagagaagaaacaaaggggctctaagaagcaagaccagtgacaaaagctggttagcagttagcttagcttttttgagtcctgtccccttagggaagcaagaacatgctaggtagtattacacattatattactgcttttttgtttgtttgtttggttggttggttggtttggtttggtttggtttggtttggtttggtttggtttggtttggtttggtttttcgagacagggtttctctgtgtagctctggctgtcctagaactcactttgtagaccaggctggcctggaactcagaaatctgactgcctctgcctccctagtgctgggattaaaggcatgcaccaccacgcacggctatattactgcttttaatgcatcatctctaatggagtaattataatcgactaagttgtaaataaggatagcttctaacaaccccctgccctttcaggaaagagaccccagaccatcctttagtagacaaagagaaaaccataaacactgcagctgcttttgtggcaagtgagagagcaatgaaaacataattaacagccgtggaacacctgcaaggtcaaaggtagcaacgtcagcagacagtcaaggacagcaatgaaaacagccagagagctttactataattatcagcaagacacctgcaaagtcacaaggtagggatgttgaccaagtaaaaaacagctagcagatagtcaactaagataagtcaactaaaataatcaactaagccagagacagagagggggctggggtgggggggacttatacccatcctgactgagcatgacacaaacatcaaatgatcagctgttgcttagaccaggcagatatgcataggcatgtagatcctctattgtctcagtcccttatgtggcataaggtcttctatatggacttgtccaggagctccttcgtcaggtacttacagtgacctaccaggagccaagaaagacccctatgaagctttctgagagttttcatgataggaggagagagaaagggggttaagcctctgatcaagtcatcacaaacacaagatagggatggaaaaccaggtccttcttccaggaagagggatgctaaaagacctgagaccagtaagagtaactctcccagataggcctctggcacacatgttccagtaatggaaagataatgcttgaacaaaagaaagcagatgcctctggtggagggtttcgagatatgggacaacaaacagatcaattgcatctatttctgggacccaactgtatacttagcccaagttgatgtctttctagtgaagagagctccaataatagtagtaatagtagtagtagtggtagtagtagtggtagtagtagtagcagcagcagtagtaatagaaatagggctgataataggagctgaaatgttttgaccacatgacaagtcaaaagtatctcaactctcattccaggggttccaacttctgaccccatcaggcattcatatgaatgtggtaaacagacatatatgaacacaaaatacctgtacatgtaaattttattaaacatttttttaaagttgaccgtacatagtaagaaagttacagaagatttgagtgtggatttgttgggaaaagaaattacttttttggctaactctagggatacgtatttctctctatcttaactagaacaggaacatacgtctctatatatgactggaattacaggcttaccatataaaaatttctgactctgcatttgcattcctttcaacttttcttgttttcaggaactattccttcacttcaagctcattgactcttatgctgggatgaattttttttctaactctcagactaaaaacaaacaaacaaacaagtaaattccaagtaaagaagtggctttcttaccctatggaaacataaaagaacttggatggataaatatgtgtgtcctgaattttcttcccatggatttcctccacatcatgagtttggtgattatgacacactatactatgaagggacgatctcactgaaggactccaagacaaatagtgaagggcagtgttccaggaaactgtcaggaccttccatgtaacgccccagaattcattcattcatcactggaatgtatggcctatatgtatatgaggtttatttggggaaataaagagagatcctggagcagggcagtggtgactcatgcctttaatcccagcacttgggaggcagaggcaggcagagttctgagttcgaggctagcctggtctacggagtgagttccaggacagccagggctatgcagagaaaccctgtcttgactgtctcaaaaaaaccaagagagagacagagagagtgagcagagagagacagagagagagagagacaaagagacaaagagacagagaaagagaccctgggcacatttttctgttaggttagttacctagcctagccctacctctaaaccagagattcctaaagatgactcaaaaaagcacaagtagtaacatttaaaatttaaaataggcaataggggttgaaactgggtgtgttaagatgagtatctggctggaatgtatcaactattctgtcactattcggacactattattcttcttctgtggcagggaggccagaagcttgagtcatctcattcttgctcgggtggacaccagacaccttagggatgggctgcaggattgtcctctaagatgagatgacttagggaaacctgtgttctaaatctgtgttccttttgttcccaaccatagagagactgagccaaagaatgtctcctcactatttaaccttctctgacaggaagcaattagacctcctgtgtcctaagatggggagatgagctgaaattcttgcaaaatgtatctgaatgtaagaaggtctgtgcctctgaggagatgtgacaccatactagcctgagcattgccagaagagatatatggtgaaccataactttaaaatcttaccaaccaattggagcaggactaacactttggttcaattggctatccctttcactaccacacattgtcagtataccaagaccaaactcaatgatttcatccaaaccagaaatgtcattgaccctcaggtttctatggattccactagagttcaagaggggcccgtaattcagtttaatgctagaaaccaaatagcaacaggatttgggtcagcaatctaccataaataaaaatgtagaatggataaaggatgcattctaaactcaacaaagacttttaaattacacaaggatacctatacttctgaaaggtatagcagatcatctggaggtcatcagggaaacggcatggtaaattggctagccctcactgtgatatcagcacataaaggagaatctgtgatgatggcaggtagtaacgttgtacttcatttctgaaaagaaaacttctgatagcaccatacaaaggctcttcgggaactacctactatgctcaataggttaactgaaattatgacaggggaaaggttcctccatcttgtctcagttgtaaccatctgtgttccaggaattcaaggtcaaaatcgcagctaactgaatgttgttggcttctgttaatcagattgcttgctttactttcccctgcatctgtcaaccaagatgtggttttcctgtaatctctgcctttaaaaactcccataagagccagacatggtggcgcatgcctttaatcccagtacttgggaggcagaggcaggcagatttctgagttcgaggccagccttaaaaaagaaaaaaaaaaacaaaaacaaaaacaaaaaaaaaacaaaaaaccaaaaaccaaaaaccaaaaaccaaaaaccaaaacctcccccataaaatgcatttgaggctgtttttctctccacgcaatttctagatggcttaatacagacttttaattcagacttcggtcatgtgagtagtctttgggtctctacctatcaacaaatagaatcccactgagatctctttgagactttttttttgttgttgttgttttttcaagacacggtttctctgtatagtcctggctgtcctggaactcactttgtagaccaggttggcctcgaactcagaaatccgcctgcctctgcctcccaagtgctgtgatcaaaggcgtgcgccaccaccgcccggctctttgagactcttaccagtgtgaccaactgtagatcttggcacaggctgtgaaccagagtacctgcaggttcagaacctagggggttcaaaacctgaaactttccagggctctggaagagaagatcttggtgaatcctacattcctgtctaaagttccttcagtaagaatcatctagtctgtcacctcctgaggtcctgaggtaagtctggttaaagtaccttctgtttaggacataaaggaaaggccagctgtagccactgatcgactgtccagactccatgtgagacatgactggattctccaatctgttcgggtataagaatgtgtggtggtcaacccatggttgtctttaatgtgcttctctttctatatgtttctgcccgttctattttcctagtggatttctctggtgtgaaaatcacccagccccatatcacctccgcttaagacctgtgcagtcttggtacggacctgaatcctttggctctatcaagttgcccagagaaaccaaaaacctccacctgtcccactcccacagtgttcctttgttgcttgactactgctcagtgggtcccagtccctgtgtggaggcatctaagtggaatgcataaagagttggagaaagttccccaagcatctcactccatctgctccccacctcctgctctaggcagccccaagtaaagggaaagtgccacagggctgtgcagggatcaggtggggtgagggttgtccaccccttccgcttccatgatttatgtcttttaaccaatgatctgatcattagaaaactcaaaagccatctttccctgaaaaggagtaggaaaaaaaaaactgttcccaagccagatggggctactgctgccagacagactgtataggatgtgttttcccttctgtccaacacaaagtagactttaaacacttttcactagtttgtccatgaaacaaaagacattacacaggcccacctgtcaaagaactgagtggttcctgctagtctaatgaacaaaaagcccacatgttaactaaggccaggaacttctaacagcaactcacacagctgagctctcctccaaggaccaccagaattctggttgtctaatacccatgtgacttagtaccaggccctactcctggactacctttgagaatggtttgagagacctactaccatcagtcctaataccctcttgcctggtgatgaccatgatgttcatccatgactgtcatgagatgacatccccctgaaagatctcaatacagagctctacactaataggactgacttcgtttaagatgaaactagtcattacaggccctccagttctccataaaggctttctgtttaggacataaaggaaaggccagctgcagccactgatctagtgtccagactctgtgtgagacatgattggattcttcagactatctgagagaccaaactaacctccaagtccaccaccagtttccccttattcaagcccaataatactgcctgggtcaagtaggtagccaaaggggccttaacaggtgattctctattcctctgaccatgaaggtagttggtattacaccatggatccactacacccaggtgaagaaagccaaagccacagatgatgatgccaagtggactgtcctcagactctggacccattaaaattaaaattaattaaattaattaaaatttcaagcccttctactccctgccccctctgtagaccaggctggccacgaattcagaagtccgcctgcctctgcctcccaagtgctgggattaaaggcgtgcgccaccactgcctggcctcttcttgagtcttgtgtttggtataaatatagggtcctgattcagctcccactgccctcagacttggacctgggaactgaggaagacagggatactgtacgttagaagtagtgtgactacagacccactgacttaatacggactatcaatttggactttggttgtgctgagtggcctttggctctaccccacagcaaaattcaagaataaatgacccattttcaaatcttaggaagcaatgtcttggaaaggaaaaaaggataaggatttcagtcctaaaattccttgttctagttctagggatatagttagatatcccgtgaccccatacatacaatggttgttgatgcaaagactatgtaactgacaaaacattgccatcatctcaaaacaggattattgatgaaatcctcaaaactggcaagtcaggcaatgctaactcaatctgaggacaagaatgaaaatgtattgtaaatgggggaaattgttggaaatttaatgtactggggttttttctatcaaagggtgaaataagacaaaattctagttaaaaaaaattgtaaagaagccacttggcagaaactcagattcctccagggtcaacacttcttgaaataaaatatgtgctcaaaaccggagcaagcataatggctcctgcctttaatcccagcacttgggagacaaaagcaggtggactgctgaatttgaggcaagtctggtctgccgatttagttcagggattgccagggctagtaatgagaccttgcttggaaaataactcaaaaaacccaaaatgtgcttgacttcttcctccctggagaccgtgctgctctgtgtaggctaactataagaatgtgagcacgccaaggacgccacatgaaaccccacagaatcatcaaacagggctcatagaggctcacagagagattgaacagacaatcagggagcctgcatgagtctgacctaggcccctctctatgtgttatagttgtgtaatttggtgttcttgtggaacccctaagagtgggaataggggtgtctctgactcctttgcctgcttctgggacccttttcctcccacatgattgcctggtctagcctggtctatccttaatgtaaatgtttgtgcctagtcttctaatgtgtcatgccatgcttggttgagatccccggggaggcctgatcttttctgaaggaaaaggaggagtggatctggaggagaggggagatgtgggaaggactctctcggagaggagggaagggaaactcaggagaggagggaaggatgtgctatgaaaagaagaagaagaacaaataaaagaaaaagaaaagaaaagaaaaattttaaagatgcaaaagaccaaaaacaaacaaacaaacaaacaaaaacaagcaaacaaaaacaataacgaatgtaagcactcctagggaagcacacagcaccctttaccacagtaatgcagcacagtaatgcagtaatacagcaatacagcaatacagcaatacagcaatacagcaatacagcaatacagcaatacagcacagacgcctgcatcccactgcacatgctttcctgctgcacagggcaggactgtggacccttcagcagaaataaaatgttttgctttgctgaaatactttggaataatatggtcattttcttgcatgctgagagctgattgtgggtttggtttgctattctctgatgactagtgttggtgagaccctgccccacccccaccccccacccccacacacacacctgccatcacttgagaaatgtctactcagccccttcactaattttttaattaacttgcttgttttgttctggtttggagttagctgtccagcttccttaaatattctggatattaactcctgagcaaaaatgttctggccaatttggaatctggccaactccttagcaaagtatgttctggatattaactccttagcaaatatattctctgccagtttggaatctggttttgagtttgttggctgtgcaaaagcaagacaactcctgccactccaatgcacaaaccctaatccctgccaagaaccaatgttgagttttttcctaggagttttaagagttccgatcttagccaggcctagttgcataatctatagccccagctactcatgaggccaaggcaggaggctttcctgggctatagaactagatgaaggatgtctgggaaacatagtaagaaggtgtcttaaaattttaagttaaagaatgtaactccaaccagatatgcttacacacacctttaattctaacacccagacaggggcaggcagatctctgaattccaggccagtctggtatacagaggcagttccagaacagacatggctacatagaaaactttgtctcacgcaaacaaataaagaaataaaaaagggttgtaattctttggtagaatgtttgtctaagatgtgtgaagccctgagtttaatgaccagcacaacaaagactgtaagttgtacatctagtattttgcgtttgcttctctgtatgtttaccaagctcctaataacgaggccttaaatatataggcaaatgctggaccatagctccagccctgtttttgcttttctgattgtatgtgggctagggtggcccaaaactcatggtaattctactgcctaattgcccctggaactggatttactggcagaagctgccatgcctggttgtatattttggaatatgatacaccctgtgccctgttacttatgctccccttctgggagacactttctctcggtctgctctccatcccaagagtaaatgaaacattctatttatattttgcccttagcagggacctaaaagtaatcaggaaactgttctatattattctgagatctagtctgtatacccaaggaaagggtggtatttggtgtgtgatgggaggaaaggtttaaaaatgattctttggggaaaagttatatggcccagtcgctaacagagagatctggggaagttattctctattcctttctttcttcacctgtaaaatgagataatattcacctgcgttataggctgagaatttgtgctagccagttttatgtcaacttgacagaggctaggagaggagggagcctcaggggagaaaaatcctccctctgtatggaatttttgaaaatagtaactgatgatggagggcccagcccattatgggtaattccatccctggaatggtggtcctgatttctgtaagcagactgagaaagtcatgaagaataattcagcaagcagcacccctccttggtctctgcatcatctcctccctccaaatttctgccctatttgagtttctttcctgacttactttgatgatgaacagcgatgtggaagcataagccaaatagaccatcgcctctccaagttgctttgattatgatgtttcatcatagcaatagtaaccttaggttacatagaattaaacagtattatttaatctgttgttataaaaatcacatctgaaaaggaataagaactagtttattttggagttattttaaataaccatggccaagaaaacaaatttaggttacatgaaatttcatgttctgatgtggaagcagtttcatgaaggtttatagctttacagagcagagaaagttataaaactcaaggcaagtttaaaatatattgatggataaactagtaaggcaagtaaaacaagatggaaggtgataattataggcctaaaatacaagctggtagcaagcattcttagctactgaatggcagaagctagtgtcctgctaagggaatacaatggcctggcaaacaataggcattccagaaagctaaaactagcccaagacaaagtaattaacctctgaaccagcaaaattccaatctctccacaggcctgaaatcccaattcacccatcatcagtctctgcagacacagacacctcttccagaagagttttgttcatagagcaagacacagcttcttctcgggaatttttatgcacagataatatgaacacagacatctaagcacccactaaatagtactggtgatttaatgatttggtgcatgtgataaacaatattctccttgaaaataccagctcatctcctctctgggtgctaacaacagcctccactagcagcaggcttacactcagagagcgattttgggacactcatatttccgtgcaaacatcccaggtcacagatattttctggttttgactatagaaaaggagccactggcatcctgacagtaataagttgcagcggggaaggaagtgcgctcattcaaaatgcacctgcgctgcattaggccagggattacaaactgagctgggctaagcagtgtcgtgtttacaccgactcgggcagctggctcagcatgaggctctggatagacacaaaggctgcttgttgcttgtcccttggcagctgcagcggtggcagcagcagcagcagcggcggcggagcaggaaccacactgcttaactagcaagaaacctgtctcagagcctctcctctgaaagaaaggtgaagaacagtatgtgccaagacagtatttcttttacttttaaaacgccatctccaaatatccttgcataaaccaggtagcacaagaaaacactattttctctgtggtggcttctccttcctgactacggggtcctctgtattgctggggctggcctgtaagcccctaggtaggcccactgctcctcatgtcctggttgtccagctccacatctgggtttctggatgataactgtctccctgccccagcccctaacacacatactcaaaggcagcatctccacccagcagacagcctcctggcctgtgctggtgacagagccagagcaggcatgaagatgaagccttttgtcacatccctgcctaggaagaaaagctaggtctggctggggcgggggaggggcaggccttctgcctgtgccatgaggcttttcagtactgctgcctaagagcaggagcacaatacaggaggggagacaggcctgaggggagggaccctctgaggagacactgcagccaccagcagaggccagagcaggagctgcagctggcagctccccagccaggctgaatgcagctgccctgcctcccttaaaggggaagcctccacacagaggagagctagggattaaagctttcatcagctcatcagagagaggcactggtaccagggaaggaaggagtgggatgtggaacaagagcaaaggcacaggcagccagcgccatgtacaccaaggtggtgcacttttccaaagcctagggatgaaaaggagaaacagagctcttgcttctgaggcatggaaacacacaccacacacacacacacaacacacaaacacacaacacacacacaaacacacaacacacacacacacacacaacacacagctaaaccctgagagaagctccctggactataggatgtccccagacagctgacacaggaaagttctttcctctgtgtaccacagcaggggcacatggcagtcttcctcccttgtgggctatgggaactttgagcacctgatgaaactttaatttttttcaaaacctattttttttaaagatttatttattattatatgtaagtacactgtagctgtcttcagacacaccagaaaagggagtcagatcttgttacggatggttgtgagccaccatgtggttgctgggatttgaactatggaccttcggaagagcagtctggtgctcttacccactgagccatctcaccagccctcaaaacccatttttaataatggatggatcttagatgctttaacctcccttgtagactactacccaccagaagtactgggaaagaaagcatacagggaagcagacttttttaaaaggttctctggagcaactcctgtctgtgttgtctggaaatcggcagtttagtttacaggttagcagtggcagcccgatccactcgcagtgcaaacacttcactgcaaacacaaacaggtatctgcagtgatggcactacctagcagagacagccaggcctcagcattggcacaagtcagcaggagggaccttaagggacaccagaagttcccagctgtgcctctctcagggaagcggaaaatcatccaagactggagacccacacacattgtgcatttcacagctagctctataagcagtccaagcttggcctcaatcactgtccatcgagtcctagttataccctccaaacatcacgtgtcctccacaggtcttgcctcagtatgcgcacctgtctcagctgacattacttggccaatcagcccgagtccattgaagcaacaagaaactgcagcacactatgggaagtttttcggtatgtttctctctatggagtactgacaaatgcagctcaactacacaatgtaagctgggccaagaaatgagtgttgttagcaaagaatccttttttttttttggttttttgagacagggtttctctgtgtagccttggctgtcctggaactcactttgtagaccaggctggccttgaactcagaaatcggcctgtccctgcctcccaagtgctgggattaaaggcatgcgccaccacacccggctcaaagaatccttcatcatgtgtcctctagcatgcttgctttagcagaacatcctttctcctgtttctgcttcagctaaacattccttcacatgtttgcccctagcaaaacaccattcaaccaagtttccaatgaacccttaagtttccacttcaacctgatgtatgccaggtctgttcagactgaagctgtgacagagatgtactctgctccttagcgagtttctacagacattggaggagcttggaaggatggtcaaatcagctgccctgataactagaggcctaccttgtatatggacccagaccctgcatgcacaatatctaccagttgggcttcagtattacctgcgttcaagttgcacactctgggtgcatgaaggctcacattcagtgcgttccatcagatttaatagcaagagggcagaagggacaaatgggagatagaagagagtagtaaggaacgctggtcagatggtgaagagtcttggtccttatggaagttccaagtggagactttgaggttcgctttttagaaatgtctacatgacattcatggaaaggcagaatttttttttgataaataaaattattgcatttaatgttattttcttaaaaacccaaatcatcatatcccttaatgttgtaccaaacaatgccagttcaaatgatagaaaatgtatgtcaacagtacctgaaaacaaaattaagaagggtataaagccctacctacagtttgtctaatttacatcaagcggtcatggaaacaaatgatcattaaaattattttataattatgtacaatgaacaaaagcatagtaagtagcagggtacttttccaccataaaattatttacagccctttgttcatctagaaacactagcttgagaggtacttgtcaggtatattcctcttgaaataacttctctacagcaaacaattgtcttctatttggaacacattgaagaaaataattgtctcattatttttgtgttttgagtcttgattcctaatagttcaaggtattatgggagaatcctggtgtcctggatagctcaataacaaactgagatctagcagagtgtttgtattctgagaatactgtccagtgcatgcaaatgcttgcgtgtaggctgtgcgcccagactcacaaagcctgttaggaaagcttcacacagactttgctttgctccttctttatagggcgttgcgcttccttctccgttttcttcctttgttgttctgctgtctcttctctccgtctgaaattttctgctgcttcaggacttcttctgcttgccaggctgcgtcttcttcctcttcccatgcactggtattttcttgccacgtatctaagtcacctaattttgaagactgatgaataaaaggcctatcttgtgcagctgccaatctactggaaaaacctgtgctaccatctgggacaccaaaattcaatggttctctcttcttaatgacaattttctgagttttctgtatagttggagttatggcctcgaagtagtcaggttccagttgctccaaagagttctgctgtgttgccacaatcccattccctccttcgatgcactagtgggctcatcttcatcccaggaagtccactcctccaggtctgtctgcttagggacagacgaataatcaactgtggtgggcaaagttatttgatctccacttaatttccttcctctgccagatctgcacattaatctctttaggaatgagaacactattgctaggcaagtacaaactttaaagaaccgaaactgagtgatggccatggtgaaaaccagaacttgcccctccccctccccgcccgcctgcgctgcggaggctcagagctgccgcgggccgtgcgcgctcagcggctgcctgcctagagctcgcgctcagccatcttagtcccagctccactcattcaaagccgggcgcgcacacgcgctccgtcgcagccaccgtggccgccccttctccaaaattccccagatttttttttttttttttttttttttttgcaaaacccagtagttaagtacatatcaagaaattagaaactaaacttagtaaagaaatgagggctgtatatgaagctcagtgcagaaggccctggatgctaccctctactcgcagcgtggaaacagacacacgcacaccagcgcgaacacatgcaggaaggaaagagtatcttgaagtgtgaattggctcttggtgaacttctggtttctgaagaagggaagcatcccattaagtgcagccaatgcatagtacctatttgctcttaaatattctgtatttggtctaggtgttatagcacaaggaagtaaaaatcaatcttaaatgctcagcaattatagttaaacttaatgcagtgagatttaaaaaaaaaaatctccggagcagtggtggcgcatgtctttaatcccagcacttgggaggcagaagcaggcaaatttctgagtttgagaccagcctggtctacagagtgagttccgggacagctagggctacacagagaaaccctgtctccaaaaaacaaaacaaacaaacaaacaaaaatatctcctactaacagtagttagctagcatgaacagcccagaaattaatgctcatgtgtgtggtcgggttatttttaactggagtgtcaagtcaactgaattttgggaaaagaatagtcttttcaaaacaaagggttcaggcaaggctttatgtgcgtgtacaaaagagtgattttttaaaaaatgatcccaaggaccagggagatggcttggtaggtaaagtgcttgccatacaaaaacaagctcctggattcaaatccccagcatccacgtaagggcacacatttgtagtaatattgctgaagatgcagagacaggtggattccagagtcactggccaatcagtgtcactgaagctgtgaacttcaacattaaattagaatgtcatcaaggaagacatttgataccaatctctatcgacttgagtctagcctctatatacacatgcatacagataggaacacacacacatatcacaaacacatacactcaaatagaaggaactaagaatgcattaaagatcaaaacagaccagttaaaatcataagtgctaacaagaatatacattagacttggcaatgactttaaaacaaagttcagaaaagcaagagaatgggaatttaaggtcatctttactacagcatggactatattaagcccagttcctaaaaacaaaaacaaaaaacaaaacaaaaaaacccatttttatacaaatagccatgtgcagtggtgtgtgtatagctataatcccaccactttgaacacaggggcagaagaattgcataccagttctaggcagccagggttacattcccagactctgtctcaaaacaaaacagcaacacaaaatgatgaaaatgccctggaaatggtggcatttaatcccagtactcaggaaacagggttcgaggccagcctggtgtagacagcaagttccaggacagccagagctacacagtgaaactctgtctctaaaaccaaaacaaaacaaacaaaaaatatcacaaagccaggcggtggtggcgcatacctttagtcccagtacttgggaggcagaggcaggcagatttctgagttccaggacagccagggctacacagagaaaccctgtctccaaaaaacaaaacaaaaacaacaaaaaaaccacaaaaatgtaacctatagttgagacaaagtatttgatagctgtattattgataaatactaacaaaaatatatgaatggctataaatcaatgaaagagctctgaaaagagatcagattgaagaagcagttggttgtggttgcacacacctgtagtcctagagcactggtgtctaatgcaggagaacctcaagttccaggctagtctggaacatatcctaagcaccaggccagcttgaagctgcagagcaaaaatactgcctcaaaaaaaattgtaatcagatttccatactgtaccaatatattattcttcaaaataaatgaacatacaagtttcaaaacaggaatttcatactccctaacaaaaataaccttggataaatgtgattttccagaggagcacatattttgatgcttaatcggaaatcagtattccttttctgtttgatcggttttttgtttgtttgttttggttttgttttttccagacagagtttctctgtgtagccctggctgtcctggaactcactctgtagaccagactggcctcgaactcagaaatcggcctgcctctgcctcccaagtgctgggattaaaggcgtgcgccaccaatgcccggctgttgttttgttgttgttgttgttgttttttaaagatgtatttactttttacgagcattggtgttttgcctgactgaatgtatgcctgtgtgaaggtgtcagatcccatagaactgccattacaggcacttgtaagaggccgtgtgggtgctgggccccggtcctccagaaagttgccaatgctcttattcactaattcatttctccagcccagaaatcgttatttctaatgcatcatcacacgagatccaggatccagttcaatgcggatgtataaatggaggcaaacagaatcttaggctgaaaagtgattttttttaaagttttatttattctctcatgccatccatctgaaccgcagctttcgctccctctagtccttccggttcctccccgccaataacccccactgtgaagcatgaaatttttgaaaaggttggcaaaggccctgaacatcgcaacttgtgattggcttagatagcagtttcctaagactccctatagaccttcctcattgggtcctcacattgcctcgcctactttgtatctagtttcttttctttcctttgcctagtggcttgtgttttagcctccttgctcctccctactctgcttgcttcctctctgccctttctggtcttagggcctgaacagtaccccctcccggtcacctttctgttctgttctgcttggcttcctgctcagagccccgagtctcctcaactcaccgagtctcctcaactcaccatcttcggtcttcgcttcgaggtctccttggccccacgctctagcctcgcctcacctacgtaagatctcgcttcctaatttgtctgccctctacaggtttgtgctttgcccaagccgccatggaaagtgacttagtgggcccagagggcagccaggatgtttccagagtggagggaacagaggtcttgtcacccccactccaagcctctcctgtaattgccactgcgaacttagctgccaggcagggcaggtctacccagagcaggagagcacaaggcggttcaggattcaggcttcctggcccagagagggtggagtccaaccaggaagagcgtctcattcctctctcacagatgatcccatacatctcctgttttatttgcaaaggctacttaatagatgcggcgaccattacagaatgtcttcatagtttctgtaaaagctgcatcgtaaaacattttgaacacagcaacagatgtcctaagtgcaaccttatagtgcaccaggccaaacctcataaaaacttgaggatggatccacaattacaaagcatagtatacaaattagtggcaggtctagaggaaaatgaaaaaaagcagaggcgtgaatttaataaagaacattgtctgggaccaccagaacccgctgctgatccacagccaggccattcaagtgaagagaacactaaggaagttgtggaatagtgtcttagtttatgtgatctggtatgtctttagtactggagtctatgggtactaatgcatacactgaacatgttaagcactgaaaatccacgtttatctgagtctcaggaaatgaaaccactggacagagagaaacatttctcaaaaaaacaacaagctttgctgcagcttgtcagttgctgaaggactttcaaactcaaccagtacagtgtacagtagtgaatatgaggatacaggatgaggatacaggatagtctgctgccttttgttaaggtctcctctcagagtgacttgctacagctatcatgaaaggacagaaagtaagaaggcctctgcagaactgaatcttaccgaagagtcctagaaaacatagaatcattataagctgtactgtttctggcatacctgttttctgcaccagaaatcctagcgtttataggattgttacagcttagaacaatgggattaaaaaaaacattgacttttaaatttccttacgattccaagaactgtgaagttgaatgttgcacctcatcatcactgttgacagtttgctcttttgttgagcccattctctttcaagctgattgaggttctgctgtctgcggtggcttcagtggtcttccttctggaaaacaacatcccaggggtccaaagccagtcttcgttaaattgcaaagtaaactcacaaagactgactttttctttttttttttttaactacgtttgtatgttgacaccatattttgaagttacctgttttttgaaagtaacagcactcctgaagagatgttattccgttctaaaaggtaggaattactgtagtacaggaagaaattgtctctagtagggtgtatgacttgagccataaaccttcagacttaacatgtcttaagataagaggcagtctttgtgagatatatatatatagttaaatatgtattaacttaattgtatatgttatacacacactgtagttactacccatgttactggtgtagtgagatcacacaagatccccatagaataattgctgataccttgtgatggtaatggtgccaccttctgaaatagcaaagttccagttaactcataagtttctatattgtttctccagcaagtcacttttactgatgtaatttttgctgtctgtttccctattatttttgtcattgggatttaaaaataaggctgtttgtaagctaactttaatgtagaaacttctatttaaaaaatttttttctttgccaaaaattttacattttgatatttctaaacgatatcctacagactcttgtttcgcaaacattttaaatcctgtgttggaaactttaaacactggacaaacaatggtaattgtaaaggatttgggaactgtctggacatggtggcacatgcccgtaatcttagtacttgggcaaggagaggggaagatcaggagttcaaagtctccttcacctacatagggcatgggcaatattggcagctgttgaaacctttaaggagtgtgggggtgggggctggagcattacgagtgtgagcctgaaagtggattgtgagaccctgtcctctatttctggccatgagttgaacgatcccttacaatgccttgctaccttaccactgtcccagatcaacaggaacaagcagccaatggtgtagccgtatggaaactgtgagccaaatgaacattttctctttttagattgattatctcagttatttattcttataatagaaagctaatcaacaacattattttatatttaaaattgatgttgagaactgtagtggattattataattgcatattgttgtaatttcctgttaatacaaattggcctctctcaggaactactaatggtagagacattttctactcctctgtgtctctttccaggttttcagtgtgatgcatccagatttgtataacacactaatgcccacatccctctgggagatctcacaagcgcttgcctcacaggaagacctccatagctggcatccactgtgccaatagccacaagaaggacatcttagttacagcatggtcccgttgttgctttggcatccatgccagcatagttgttttcgccatttgggtttttgttttatttctgttgtttttgtctgttttcccctgcccactggttgagcagatgttggcctgtggttgttgtcttttctcttacatttaatataaactgattctgttacttcatgcatgtgcctctgtgtgttttgtactgcctcatttggtgttgtgctggactggcatgctgcaaagaaattctctgggtaaaggcttttttaaatagtggctatcttggtaaaaataaagtggacccaaaagtcctaagaatatctcccatatccacaaactctggagctccatcaaggcagggctccagggacacacctcaagttcaacttcgaggaaaagaaatccttgggatatcaaaaatgtgtatgccctttgagctgagagacagagcatgtgctcacgttcattttggcttagtgtctggccctctcacttggctagcactgtgtgggaaggctctcgggtttgctgatgtgtctgtgttgctgtctactgctgcctgttgtattgccttggtcaagtccccagtccccagctacattgatgggtctgaaaatgtctgatttctttctaggacccaatttgctgggttcatattccagtaagagtgaccacatgtcgtattggtctttttttggtttgtttttgttttttaagatttatttatttatttattatatgtgagtacactgtagctgtcttcagacactccggaagagggtattagatctttttacggatggttgtgagccaccatgtggttgctgggatttgaactcaggaccttcggaagagtagtcagtgctcttaaccactgagccatctcaccagtttccttttttttttttttttttttttttgtttgggtttttttgagtcagggtttctcggtgcaggtctggctgtcctgctggaactcactcggtagacaccagtctggcctcaaactcagaaatctgactgcctctgcctcccaagtactggaattaaaagtgtgagtcaccactgcccggtgtattggtcattttgtaacagagctgctagtagagttaagtcgagtctgttcccgaggttctgtctgtgctgtggtggcttgttccagaggcacaggggaaagggtgagcctgtaaggagcggccaggtagataatgggctggtgatttcaggatcctgtgcatccactaacttggtgaggggttagatgaggctgggattttcagcctggcaaagtaggagagtcacattcactaggaagacaaggatcctcactggccaatgtggcaatgtcttcccttgatgactccccgcccctccaataccctcctccgtgtcaaaagacttaatgctttgaatataaaggcagaaattcctcatcttcacccctgccccagggagcctgaagttccaggatggaaaagctgggtagcgtgctcagtgctcaggatgcctaaggaccttgtacaaggatcctgccctctgtgctttagggatggatggcttggcctaaaccaggtgagatccactgggtccctctggagaaggcagagactgcctcacattggatacagtgggacccacaaatggaagccatctatcactggtggagatcctggaaaccctacgaagttgttaggtgaatgtctcaagacaggaaacattcttctaagctacctagatatagaaactactcaagaaaaatccttacaaggataggtgaaggaaatacttttttttaagttctgtcattttggaggaagggtcacaggaaggctcctggatgtaggtaccaggtcccttcgtttcctgcttttcctcttaggaaccaggaagatcagggataatctgcaacttttaggccaaaagtcagcagtgggggatgggcacacacaaggaacttctggtgttctctgaacctaacgaagggggaaaaaatcctgctgctattgtggcctcatattcatgggcacaaaagaggaagctcaaactttgattactgaggaaacaccacttgcagggagcacagagctcctccggattacttaccattctataagcaaaccccgagagaggacaaataggaaggttaaatcatagctacatgccttttaacactagcacatgatacactatgtgcccataaaatagaagtaaactgtcaaaaaattacatacttcgattcaaaattggtttgagtactttccctggtttcagtttgaagaaccaaaccaagcaacgaacccacgatttaaatctgatctggcaaaagctgaggcttgcaggccttcagtttagtaatacatgccctacacctcacacttcaccaattgaaccagcaactgatgcatcgctacacaatcataacccagttccaggccctgactataggctaatgttctactttgtttgtgagataagtgtctctccttatgctagggcatcaatcagttggtttgactggctcttgtctccagcttctccagtgctgggaaggcaaacatgcatttgtgtgtggatattaggtgaaggaggctcaggggcggttaggccaaaatggaaagcagtctctggttgctccttgatccttttcctcaagggtgttggatctgatacagtttgctaactgaagggtgggcaggaccaacaatggagagatctgcctgcttttgcctccctggtgctagattaaaggccaccactaagccagtttgaactgcttgctctttttcccccttttcttccttccttccttccttccttccttccttccttccttttcttcttggttgttcaagacaaggttttttctgggtaaccttggccatcacggaactcactctgtagaccaggctggccttggtccacctgcctctgcttcctgagtgctgagattaaaggagtgtgccaccaccgcccagcctgctctagtgagaagcagaggggagcagggttctttttgggttgatttttttgtttcgctttctttctttctttctttctttctttctttctttctttctttctttctttctttctctctctctctctctctctctctctctctctctctctctctctctttctttctctctttctttgtctacttgtttgttgttgttttttttaaagatttatttattgtatatgagtacactgtcactgtttcagacacaccagaagaaagcattggatccaattacagatggttgtgagccaccatgtggttgctgggaattgaactcgggacctctggaagagcagtctgtgcttaagttggccacgatacaaataagctaggagatcttaagagtgttctgtatctgtctctgaactgcctggttggcggatatggagattattgctcaaatgggcaatctctctctctccctcccttcccccctctctctgtctctctctgtctctctgtctctgtctctctctcacacactcacacacaaacaccattatcatcatcatctcccaccacgcccgtactcctgcttgctcctatgtagtgtagcagtttactgggaacaaaaacaatccctcaaaggagaagggggccttcaggtatctcttgcgaatagaaatgtaacaagactctcaaaggcttctgcccagctttgcagaagtagtaaacaacagctggaagacaaaggagactgactagcccagctgtctagaggctagttgaattttctccaagtttttcagagagctccaaagataagcttttcctgactaaaatgcttttggcttggtatctgtaactgaccactcatccatactcctggtggtgaccccaattaaagctcacagctgcttcaccaagttggactttggtgcagttgttacttttgtctgccataggctccctttcttgggtcaagtagatgagtatgtgtttcattccccccaaaagtgtgtcacaacaaacttcagtgccccaacagggacctgacaggagcaaagatgagttggagaggagcaattgtgtgatcttgtttatataaagcaagccatacaattgaggccgagcaagctgcgggtggggtggatggggggtcatctaaggaggaaattccacaaagcagtctcctcactggaaaccaccacaacctcaatccatacggtgtgcgctagcgtgcctttttgctactgcattggtttcatggttcctgctaggagaggtgagatgtgtaactaaggcagagccatgggtggagtgtctgtgagagggatcccaggaaggcagtcttcaactctctggtttggggtagcatccctgcctgatgagtggaatctaacacttgaatgtggagatgcctgagaacagcgaaaggtttcaaatgttagtctttgagagtagcgcagaagggcagagagtatcagtagccagctatggaagttgctgggctgctgctatgagataaaaatgctttggggcaggaactgcagcccagcaggaacctgttggtgtaaaggaggaattataagaaaggcagccacagctagcatcctccatgttggccactgatttagcaggtgaatttgataaaagaaaggatgagttagaggtgttggtttgccacttattatagctggggaaagtacaggttatgtgagtgctgaagggcccttcctgggatccaagaacttggaacccaaggaaagaacagaagcatgagaaagaagaaaagaaagagactttggtaaaaatgagaaaagacacataggtctaacctttaatagaaaagatgagaaaatctgtgatccaacttggagggggacatggtttaatgatagtcccatacaaaagtacctttgatactagggactactcatccctgaagagcttgaattgaagaaggctttaaaataagcaatgaaagatcctgtcgctgcctggctcatgacactgggtcacactggagtagacgggatcagtctgactgctgtggagacagataactacccctctccttaagacaggggtttcgtaacctgaaattcggatgcatggtgcacagagacaacagaaaaaaagaacagtagttacctgagtctgggggtagaccaatttggcaaagattgcttaatggagagctgcaatttgaaataaattgaaaaagtttttgataaagactaatggtaatagctgtacaatagattgaataactctaaatgacaatttaatcttatatgtatgtcacaatgctaagcactttatacaaaaagacaagttatagactaggagaacatatttgagaagacaaattttagattacagacttacatctagaacttgcaaagaacacttaaaacttaatatagtcaagtcttttgcttactaggaattcagttctaatcaccaaaaatattatgtctagatgacatatatgatatatatgtgtgcatgtaatatatatatatatatatgtatatatatcttttattatcaaaaactgtcaatgatcatctaagccttccttcagtatgtcaatctttctgttgtcagaggaccttgcttcgggtggctggacagaatagaggttgttgaaagttgaaatgactgtgacaatgtctcaacatacaaacactgacagtgagtgggtggcacaggcctctaatctcagctacttaggatgctgatataggagggttgcaaactcaagatcaacttggctacagagagagtttaaggccagcctgagcagcctagtgacatcctgcatcaaaataagaaggagccaaaaaataaaataaatccatcataatgttggaaatcagtcataatgttggagacaataggcagagacaggcagatttctgagttcgaggccagcctggtctacagagtgagttccaggacagccagggctacacagagataccctgtctcgaaaaacaaaaacaaaaacattaggccttttctttagcccatgcttcaccatctttgatcattcaacactgttaaatcataggttttgaatattttggagaacagcttcctcctctggatccatctggcagtagggtttctctcagtcttctctcccatagcaggcagacatatagaaatatcagggcttgtcattgtgctggaggtcatcctcatagttaaggaacagcatcaaaaaggtcacatccaatcagaataatcacggctgcccattcaaagccatagactcaattacaactgtaggtgctaaccagcaccccttttgtttgtttccaaattttatctttgcacggtcataatgagatgagttaaatctattataatcttagtagtgatgctgttcatctctggaccttgtgaactcaacttttgtttaagttttatctcctcttatttacagttgttccacactcaaatggttctatatcaatcaaactccatctatctgggttctccaatcatcctccagtgcctagaagttggcaagaatggagaccctaaacccctttacaaccctcggatcagctggaagcaggtagattgactcaatgtccatattctaaataattttagagtcttgagtctttctttgttttggtgtttggtttttcgagacagggtttctctgggtagccctggctgtcctggaactcactctgtagaccaggctggccttgaactcagaaatccacctgcctctgcctcctacgtgctgggattaaaggcatgcaccaccactacccggcgagtcttaagtcttgatgggagaatgttaggtagctaaacagacattagcggggttgaaggctattgaggaagaacctctctcacatagaactttccttcttcaaattttctgaaactgtcccaaggccccattgatgaatatgccactcttgaccagagaaagagagagagagagagagagagagcccctaggatgatgacatgcccatcatgccctttccctgactgtaagcaatacttgctttacaatgagagtactggagggtttgagaacaaaaagttgggtgggtaggaaagggggagtggatctaaatgaagtgtggagtagacggtgaatatgatcaaaatacattacaagaaaaaaaaactaataaagaaaaaaaagagggagggaagagtgttagagactcagaagtgaaagcaaagcggtttattatttgcatcagcctggaatgtcaggtgggctggcccagtgcatagagaaatgtatatactctaacccatgacctttcctccccttccttccttccttccttccttccttccttccttccttccttccttccttccttccttccttccttcctccctccctccctccctccctccctccctccctccctcccttccttccttccttccttccttcttcctacattccttccttccttcctttcatagtctggacaatcttaacatttcatctaggcattatctttccccacgtcacattaatttatttatctgtttgtttgtttatttattttcttaacaaaacgggttcatctctatgtattacctcttgtttatttggtccagcttatcaggtgcatagctgtgcaggcgagtttagctatgagtaatttaattctctacacttctaggtggggtgaagggtgtgtggtgaagcagactttgggggttaggaaattggtagcctagtatgcattagcaaggactaatgttttctgctcatttgtagctggacttaaagcttaatgctcctttgaaatgaaccatcttatagtattctaaaacctatctgacagaaacagaagtcaggaatgttagtcagggccatgctacttcacaaagttcttccaataactagttctcctacattcttgctatctccaccctcatagctgactcagcttataggccccaggctaacaggctcctttcatccccactgccagccaggatgagacagcaagcatgtgcattactgaagtgctggagaaccttacttttcctctaaaatgatagaagggaccctcattctgccatgtgggccatatcttttcacaaagccccaccacgttgccctgtccatcaatgacattaataatctcttaaagaaatagggggaaaggggaccagagttagcatgaaaggtaaaggtctgtgtgtccttcacagtacagattatcaggggaatgatctggaaaagagcagcaaccctagccaggaggcctccagtcactctcagaaaaacagtcaggtggggtctacagaagaaggagaaagaggggatgaaacagatgaccaggatatgtctgcaaaagagtggggggactgccattattttccagactccatgaagctaccaagccatctgaatagaagctgccctctttgaaacatctgcaccaaatcaaggacatttggaggtgacgctccagatgtttgacagctggcagccaactaccagcgtgatgatgatttcgaaagtattgagcaagagcaggtcaggatgcacatagtgcttgcaggccaggctacagccagcatgcttagggggagcccttcagccagcagcggagagctcctgcaaatgctatcttatgctgattctttctgccttgactcttcttatgttatgtttaccttcataaatcactgtagtcattattttaacaactttatcttgaaatattcatgtgaaaactttgttaattcatacctccatgaatttattctcttatggatttgagtgaatacttaacttctgtgttccaatacattctaactttaaattttgtgccttcatctttccatttgacaaactcattttagcattttatttgttttaactaataatgagaaattagacctgttgttttcacataaacttctggaacccttttccccttcagttcagtatttgtttcatttattataagttctgtctttgttttatccaaaaaaaaaaaaaaaaagcatttaggcctggcccgcaggcagtgatgcagtggtccctttttggagtcagtttcttttctgctaatcttgttatttagtcctcactccccagggcaccctactgccttctactgccccccaccagtgcctcccaccccccctactgcctcctactggccccccatcgcccccccactgtctcctactggcccctactgcctcctattgctcccccattccctcccccctatctgaggacagaaggccttgctagcaaactctctgctgacctaaactcccaacccctactaatcttcgcttttagttgctcatatcatttttcattattcctatcatttgcaaactgtcactctcctatattcagattgttttttgattacttatttatttttattttatgtatattgctgttttgagtgcatatgtctgtatgagggtgtcctatcaggacacagaagttacagacagttgtaagctgccatgtggatgaacctgggccctctggaagagcagccagttctctgaaccgctgagtcatctctccagactgttttcttttaccatgatgatttacatttttacatgttgtgatagaaaattattagtatgagacaaatacaatatagccatcttgcccacaccacccagattttcccaaggaatcacattgcccataaataaagcacagtacaagccaggcagtgatggtgtacacctttaatcccagcacttgggaggcagaggcaggtggatttctgagtttgaggccagccttgtctacagagggagttccaggacagccagggatacacagagaaactgtgtctcgaaaaaccaaaaaataaataataaataaataataaataaatacataaagcacagtacccaagccatattaacattgcatgttatcacatgcatagacttgtgtgatgaacaccataatggaaaggcagcatcaatacaatgacattcttgttgctattcctttatttatttatttatttatttatttttttaaagatttatttatttattatatgtaagtactgtcttcagacaccagaagagggagtcagatctcattacagatggttgtgagccaccatgtggttgctgggatttgaactctggaccttcggaagagcagtcgggtgctcttacccactgagccatctcgccagcccctgagccatctcgccagccccgctattcctttacacacagcttttctttgcaatttgtgatagatgaaaacagtgtattctaatattaggataaaaataatatgaaaggcccggagagatggccctacaggtaaaggcgtatggtacccttgaacacatataaaggtgaaaggagagaactgaccccagacacacagcacagcaatgcacacaaacactaataataacggtagtagtaataataataataataataataataataataataataataataaattaaacatcaaagaatgaaatctataacatttaaagaatattgtcatgaaaatgatggtacagtccacaaaatggggctttaaaaaagtctttgccaactgtacattcgacagaagattaacatcgacaggttctttataaagaaattaaacccttcaaaaccccacaaataattcagccagtaaatgaaactgaacacacacaagtggccaatatctgaaaatatgtccatcaccctaagccatcagggaaatgcaagtttgggagtacatttgagattgtggaaaggagataaagccaacaaggatgtagggaaagggaaacttttattttactggtacagtgactctggaagttggtatggagagtcttgaaacaattcaaagaagaattatcaagtcaggcatatgcgtgcaatcccagcacccaggaaacagaggtaggctgatttttgtgagtttgaggcatatatgtattcaaatgctgtaatgaaacccacttctttgtttgctaattaaaaaataataatttccaagcgacttcatgaatagggaggtagcaaaatgtatttataatattgttatatacgcaataatgtgaatattctgcttttgatactaaatcacagtttgcaaggctgtggtggtttgtgcttagaaggggaaggcaggatcatagaaattctgggagctcaaatttaaggccagccagggatactcaaaaccctgttcaaacaccaccaccagcaccaccactgctgccagcaccagcgccaccatcgacatcacagctgccgccgccaccattaacaccaccaccagaaaaaaagctaatgcatgctaattccatgaattattttattttacatgcaattgtgttaattccttaatacttggaagcaagttgtatgctattaaaaaataataataaactgaggagttgcctaagcaaaacaactcaaagtagaaatactgtataaagaagaacacattaatactctgtaagaaacatcaaagagtagaaaagacattccttgggtaccaaaaacaaagaaatcaaagctactatacggaagccaaggcaagaaatgtggccaaacaaacacaaaggggagtttaaggaggaagggctgcctgcgggaagccaagacatctatccaaaaagaaagtgattattcacagccacaatagcaccacaaaaaagggccttttcttatcactacctctgctgtgtactgaatttatcccagtccaagagatgaaaagatgctacctaccactacatcttgcctttccttagtatcctttttgttcactgacttttatctttttgcctaattacctatttttattagttaataataacaacaggaacaggagagaataattgagaatttcatgattttttaaataattttattcagactatacaattgaaaagtaagaattgcagtggtttttttttctttttctttttttttttttttggtctgttttgtttttagagacaaagttcctctgtttcgtcctggttgttgtggaactcactctttagactaggttggcctagaacttaattagtttaagaccataattacaaaggctttattgtttgtatgcaaagcaagttaggttccttctggatagtttgtggtatatattatcataaaagtttttattttaaacttatatatataaatatatctttaaggataatggtacctaagtattaaaaattcctataaccagtcatggtggagtaattcatcccagcactcagaaggcagagcaacttttcaatgtatagtctgaataaaattattaaaaaaaccatttgattctcaatttctcttgaaattttctcctgttcctggtccttttggcagataaggcatattttagacaaaacagtattattatgaagactagtcatagaacaaaggagttcagaaagacaaggttaaaaagtctatactgagcccgtgaggtggctcagtgagtcagggtgccggccatacaaacctaacagtcagatctgtatctctcacccaaaagctatgaggatgatgcgcaatgagatcggtatttccatgccacctaataacacagtagccatttctcagttgatgcttcaatgaaggaataatttaaattatcaagtttaattatgaattacatttctcttttgtcttcttttgcccctcctggggattgaacctaggacctccttcatgttggtaaaagcactctgccactgaatcacaaacattaacagtgtgtattacagtttgtgatccatgggaggagtgaggaaaatagcaacacagtggctttatggcaggagtgtagtgatagagcacttgcatagtgtgttccatcaacctttgccaggaaaactagtaaaattaaccggagattggaggaagctgattccaaccttgatgggtgatcttggggatgagccaagattttagtagaagaaataacctcagatgtagtgaaaatatcaaaaggtagaattgagaaaggagtctaaagctgttagttaattgttggtgttagagggatggctcagcagataagagcaccggctgtgcaagaagaggtcccaggttaggttctcagcacccacgtggcagctaacaactgcctggaactccagttccaggggatctgacacctttttccagcttctgaaagcataggcacacagatgcacacacacacactcagaaagagagaaacaaacaaataagcaaataaataaataaaaatgaatggatgaggagtttgctttcttatatgaaaaagaacgagtttcttgtgatggcttttaaatgttgtaaagatgctgtaaacactgcttccatccatcacaaagaattgaaaatattacattcacttggtagcacagtagcagtgcttgaaagcactaaatgcaattaaagttcaatcatagcactacggagaaatcaacagatgtagagagtcaacggatgcagcaagctatcttgttttatttcaacaaatttactcagctaccccatcattgagggggcagggatgtcaaaggaggcgccaagtcagaatgtccttcccaatggcacagtatgcatagtctaaggtaatgctttaggccagccacagaaagcaaagggtgttaatggtcctgtagtgagggggatgtgtactgcaagacggccccaagttgattgacattaccaaattgggttaaagggcgctttaaactttgtagtttgggctggtgcgggtgcttaaaaaaaaatcccaaatacattttgagataaagggacagctggaaaattctgcaggacaatgagcatagtgacttctgtggtgagtcactgctcagtggcttctaggccctgggtgcctgggaagctgctgagtgagtccttgcccacagctctctctgtttagggctttgctctctgaaaaggacacactcctcactaatgggacagaaggttttcagcctcttttgctttcagcttcttcgtttaggtaaaaggaacagagggacatattttatagaaaaggtggtgttaggggcgtaggtggcactgagatcattctggccacatcctgctgaattacaactcattattgggtggcagtctctgaatcagaggctggtatctgacttcacacatcagagggatagtgcttgtgtgttgcatggtggtttaggtaaatctggatagcacgtggagtagaaagggacctatggatataaaaatcaaaatggttattaacatggtaacagctcctataagcaagtcgattcaggatgagttctaaaaccatttgttccagaatttgataactacttccagtttttgttttgttttggtttttgttttgttttttttttttttttgttgttgttgttgtttgtttttttttttttggtttttttttttttggtttttcaagatagggtttctctgtatagccctggctgtcctggaactcactttgtagaccaggctggcctcgaactcagaaatccacctgcctctgcctcccgagtgctgggattaaaggcatgtgccaccatgcctggctccaggttttgaaatatggtcagctttgttgctgcaacctaacctagccagaatgacttacagaaaagctctgctgctttcccccaaagaggccaagtccccttttctctggccaagagatttaggcctcttctgttttggaggagtgactcctgccaagaaccctacctgataccagaccctttcttcgtttttacttttaaatacttattttatgcacatgagtgttttgcctgcatgcatgcataagtactgtgcatgagtgtctggtgcttgcacaggccagaagagtgagttgggtcccctagaacttactgcattggagttacaggcagttgttggtgctgggaaccaagattctctgggaaagcaacaagtgctcttaaccaactgcgcaggcccaatcctagattcttgttaaacactgagaaattgcatcaaggatttcctgtatggcttgcgataaggaatagtagtgtacaaagtacatagttcctgtgccaacatctgtcattaaccctaagattataaggaaagagtaggaaataatcacgtgtcttctattccacatgcaaccagtcaaagctctggttattgggagcaacatttatgttgggggctagggaataggtatagcagtggaaagtttcggtctagctgatgaggagacacaggtcaaggggaagaagccctgtttgaacagctggtgaggctaagggagagaaaacggagtaactgggagggtgccgattggggggggggggtttagatcattctaccaaactgaaagggtaagggtgccctcccatcaagtgttgaagtgtgatgctgtgaaagagacagggtaccacaaccttcaggatcaggtctgccacttggtggccttctccaggttagctggcctgcaagcttctgtctgattcttcctttttgttccgcccatctcactggagcaatactgggattatagatgtttcactgtgctccgggggacaaattcgggttgtctgagtagcactgcaagtgtttttactcagtggcccaactctctggtctggacctaggatcttgaactgggaggtctgagctgtctgcttttctgcaaactagcgtaggtgtactacaggaggagctggctggctggaggtcctacatcaaaacaaggtgagcgatgagacagactcctgaaagcacacacaccagggaaaattgtacaaactttaaatctttttctctcccttcccttcccttcccttcccttcccttcccttctcttttctttatagaaaatttattgcaactctccaaccgcacattactttttctcttcaacatcttgctccgcagcttccttcacgctttttgcttgggcattggcacaggccatgtgaagactggcaaaagccttagagttctcttctgtgtcgacgctggccttttcctttttgtacacattccgggtgggcatcacaggtcctgtcagttgggtggccaatttaagttcttcaacagaactgtctcccttcttcagagaaggcttcctgggggaaagtatgagctttgagcagtactcctttaggcgctgcatggtagcttgcagcgattcagtggatttgtttcgcctccttgggtccacagagatgccgatggtatgatttcttgtggttaccagtcaccctgagttcctccaggctgaagcccctgacagctcagaccttggtgtgtttttttttttgtttttgtttttgttttttcgagagagggtttctctgtgtagccctggctatcctggaactcactctgtagaccaggctggcctcgaactcagaaatccaccagcctctgcctcccaagtgctgggattaaaggcgtgcgccaccacggcccgacttggtgtggtatctaactgtagggcacttcacggtgggcctgaccggaccggatgcgggacgagtggcaatgcagcacgcttttgcctgccgagccctgagtctgcggatcttgcatggcagctggttgaaccaagtgtctactagctgctgccaatgtttgtggaagtggggcttcatgatcacgccattccggctggacgccatggctgcctcctgtacaggagaacgacagggcggagaggtcttccttctttctctatcctccctgacaaactttctctctctccctctccctccccccccccctctttggtttttcaagatagggtttctctgtgtagccctggctgtcctggaactcactttgtagaccaggctggccttgagctcagaaattcgcctgcttctgcctccctagtgctgggattaaaggcgtgcgccaccactgcctggcttgacaaactctcctgacacatggtatcatgtccttaagctggccttgaactcagtatgtagatgcttatgaccttgaacttctgatcctcatgcctctgtttcgtgctaggattacaggccagtgtccccaaacacgatttgagaatttattttcacagagatgcaatcatcatacaaccggtaaacggtgatctttcaacaaaagatggtgaaacaattgaccggatttcaaaacaaaacaaaacactcattcattatacaaatattcattctaatgaatactagatttaaaggtactaaagaaactttatatgacatctatggagaaaaaaaaaggaaaacttgtgcgttgtttggaaatggctttgaaggaacagtcctagttctagctggtaaatctggacttctccacatgcatcagcgaccaggagactattttacacacagagttaaatgcagaagtgactagacatttcaggaccagttttcctatggtcagaggaaagttaaaaaaacaaacaaacaaacaatactacctccattacagagtcctccgtgtattcatgtttattttcataaataacacagatagctacacactgagataattaaccaggcaccagcattactatatacatgtattttctaggttgctgcttagtccagaagcaatgaagcttcaccggttaaaggacactcaatactcacacaataccttctaaatctgtttttcaacaggaagtacccaggctcctcatagaaatggctagggatagacatagtgaaggcgaactacaaggtaagcatcactatcttagagtacacgaagcactggggaggtgatggcagcaagagccattctggactacataagaccctatcacacaggagaaaaaaagtagagattgtaaagggtaaattgataattaggggctggagagatggctcattgctgttccagaggacctgccttcattcccagcatccacatggcagctcacaatttcagttccagtggatctgaccacctcttcactaagacatcaagagaagtggctgggacatgtgttaacaagcacaagaatagtcgggcagtggtggagcaacgactttaatcccatcacttgggaggcagaagcagatggatttctgagttcaaggccatcgtggtctacagagtgagttccaggacagccaggactgcacagagaaaccctgtctcaaaacaccaaaccaaccaaccaaacaaacaaacaaacaaaagcaagcacaagaatcaaaagcataaaaaatgaggaaatttgttctcccttctgggattttcttcatttatgtgctcagggcacacagaaggttgaggagaacactgggaaatgacccacggaccacacattttaggcataaacagtgtggggagagttggaaaaaaaatccacacagaagcacacacacaaagaagccctacttagatcttcctctcctatacagaacaaaatccttattccatacaagaagggcaacaaatactacagcctctggccagttgtgaaagccatctgaccctggtgaatggacaggaaggggttaaataaaaacagttccggggaaaaggtagaaataaatactgtgtctaaatttgggaaagggagcagggggcaggagtagggagcaggaatccaccacacaatccaagactgagatataataaaccagcagatgaggcacactccctgccagtcacaaggctaaggagcactacagtacagcactacaacataaggcttactacagaagtaaagacagttacgtggaacaagagctctgagacacagcgcaaaaaccacctgagagtaatggagttatttaggaaaccagaggcaatggctccctgtcaaacaccctacaaagatgtatcactctgagaaaagcaagccgcagcttcatctccagagcagtggggcagaggcttaggccaggatgaaggaagacagagcccagaaagacatcctcaagaaaactgattaggaacacaatgggggaaggcaaaagcctaagagtggaaagcaacaaacaggaaattctaactggctgaaggtactaaactagtctaactcatcacttagtctgccttatgtgaaagctcactagtaggaagtgacagattgaataagagaaaaagcttgcaaattaaaggtagctatccacgagtctcatttaatttagaagcttacatgtaaccctattttccactggggagcaggaaagtggaggatgtttacactttaagtgggagtagtaaagtcgtttttatgagaattcaataaacttaagagaaacatagaatgggctaggactttctgttgagcctataaaccagtgagtggtactcgaactaccatagatgacaacccctttggcaaacctctatctccgaaaatatttacattgtgattcataatagtagcaaaactacagctatgaagtggcaatggaaataattttatggttgagaatcaccgcaacatgaggaactgcattaaagggccacgagcagcattaggaaggctgagaaccactgctctagacagacatctgcttgtgtactatttttatggaatttttatttttttctagacagggtttctctgtgtagccctggctgtcctggaactcactctgtagaccaaactggcctcgaactcagagatctgcctgcctctgcctcccaagtgctgggattaaaggcatgtgccaccactgcccggcttttatggactattaaatgaaacctaaggctaaggcagtgatgtagggagggcaaaggtgtatctaggaatatatagtttccaatttccccttgtggcacaaatcagtttaatgaaaacctaaggaaaagccagggatggcggtgcatgcactctgagttcagggacagcctggtctacagagtgagatccaggacagccagggctacactatctctaaggggaaaagaaaagaaaagaaaagaaaagaaaagaaaagaaaagaagggaaggggaaggggaaagggaaagggaaaggaaaagaagggaagggaagggaagagaagagaagagaagagaagagaagagaagagaagagaagagaagagaagagaagagaactcaagaaagagaatagaggtgattattatattcctcagcaggtctgagctgtataagcagaccaaagtatactttcctagtatcttctactctcatttgataaagcaagcataataaagcactgtgtttgggagtggccattcttggactccttcataggcttcaaacactacctttacaaaaggatacaaatttatttgagtgacattttagaacaacattaccaagagccatgggagagatgggggagatagttcaatgggcaaagtgcttgcatgaagacttgagttcagatcccaagcacatctttagaagctgagcatgacggcacagtgcagcactcatggatagaaacagatggctcccacaggcttgctggccagctccaggttcagtaagaaaccctgtgtatcagtcacttttctgatattgtgataaaacgtggccaaggcaacttagataaaaaaagagtttatttgggcttacagttccatgacagagtggaggtggcaggcagcaggcatggtagctggagcagccaagttgaacatcttgaactgcaagcataaggcagagacagtgaagtcaaaatggtgcaaatttttaaactctcaaagcctgcctccagtgacataattccatcaacaagactgtgcctccctagcctttccaaacaatggcagcaactagggaccaagtatcccaatgcctgagactatggtggatatctcgttcaaactaccacaccctatctcaaaaacataaggtaggttgactcagatcttccagaggatgtaggttcattcacagcacctataagacacctataaacaggtgttttacaactgtcaacagctccatcccaggggatccaggtccctcttcctgcctcccctgaacacctagcacacaagtggtatgcagacatatgtcagcactctggacgtagaggcaggtagatttctgtgagttctggggccagcatggtctacagagtaagtttcaggacagccaaggctacacagagagaccctgtctcaaagaaaacaattaaaactaaaaaacaaagtgaagcacaatagaggaagacacccaaagtcaacctctaatcacatgacgtgtgtacgtgtgtgcatccgtgtgcgagaaaacagacacacacagacacacacacacacaatgcctgggacaaaaacaatagattagcacataattaatacaaagtgatagttcaatatgataacaagaaccagagattaaattcaatgctgttctcccctaagaatgacaccgaggatgtagtataaataataagcactttagttgaagtcctgtcaaatcgtgaattgaaaaaaggagaccataccaatcaactctaaaacataggaagacacactactcaaagtcgctctgatgaacagagtatagttcatcaagcctatatccctgcattctggaaactaagaaagaagattgcagggggcagaggcaggcagatttctgagtttgaggccagcctggtctgcagagtgagttccaggacagccggggctacacagagaaaccctctctttaaaaaaccgggaaaaaaaaagattgctgggagtttagggcaggcctaggctaccagtgatttctaggctagcctgtactgcagagtaagactttgtctcagaaacaccctccaataaaagaaatcactgcaacatattaattacataaaatattcaagtttcaataaagacggaaagatatacaaggaagtgggagggtaggatctgtataaggaacagaaactttagtgatagaaaatgacttaaaaaacacagttcacacctgacacctgggactgctaatgacaacaggagctagaaagtgctcaaaccatttagggtatgaaccttgaaagaaatagctctgagttctatccttggccagaaactgggacatgcccttgctcctgtcttgtcaggagaccagaaatgcaaaaacaaccactatcataagagaaagagaaaataatttatgaatatcaacagttaaagaagagcccccagagcaccccacattaagtctggcaatggtgatactaacgtttgctaaatgaagacaaaaggaagtaatttcttgggaaacagaagttgtcatcgttgggttataagacaaagataaggagaagcacattgatctactgtagaaaccaaatccaggacaataaaggcctccatgatgtgtgacacatcatcaggcttcgtctccagtcaacaccagctcaggcaggcctcccgctcttgtttgtaggagaaagaggaggctaagtcgggaggagcacggcaagtttggggctcactcaacacggtgcatgccacatagcctacagggtaaaactgtgtctttaaaacagaaacaagcaagcaaagaaacaacaaaatcctcagctttcctaaaacaactgaaaagcaaaagccacttcccaactatcggtccagattaccctgataatcaaaaccaaagagaaagcaaacaagtaaacgaaaatcaaaaatacaaatcagtattgcttgggtacaaagactataacaaaatattacatttaattaaataccacctgaaaggaattcgagtttgggagatatgtcagtgtgaaatgttttctgtgtacatatgagggcttagttaggatcccagccaccgtttttttttttcttttttctttttgtaggcagtatgacagcatctgtcaattcagcgctgggaggtagagatggcaagatcatagggcttataggaagagaacatactacaggcaaatgtagtttattgccagaccccaggggaggttaaacgttttaaaagtcaatccataatgagctaggcacggtggaccatacctgaaatcctagcccctgggaagcagggcagaaggattgggacttcaagggtaagctagactacaagcaagactttatcttaaatttgaattagttaagtaactaattcattaactaattaatgattttaacaacctgggctgagagcataggtcagtgggagagtgcttgcatagcacattccagttttaaccccaccatcgctgaagtgactgtggtaacgccatcttgtcctgattttaccctgactccactttgttcaggtacctttttcagcccctaatcccctaaaaagtccaacccaccttgacagcatatttggaactttctaaggccctgaccacagcacaggtgaataatcaacctaacagctgaatgtataatcaagagaaacgttaccaggtttccccggacccatgcctgccaatgacatcattgcagtttttgcctttacaaatgcagtacctttgagcttcagtgctcttcagagcaggagtctgcactctgttccaagctaataaaggactctaatttggtcttacattcatagtactttgaaactttcttgcttgggctataactgcaaaataaattttccataccaacagttgaaagaagaaacacaatcataccaacagatacatttttaaaaatccaatatttatttattatctatgtgtatgcattattttgtgtgtatatgtgttcataagtatgtacatgtgtgtgtgtgtgtgtgtgtgtggagttcagagagtgatgttgtgtcatttccaatcactctcaatgttagtttttgggacaaggtctcaaagaacttagagtccattatttggctaggctggctggccagcgagctacagtaatccacttgtgcctgataccctcactcaactggagtcacaattgcctgtcaccatgcccagtgttgatgtactcaagtgttcctgatcctgctccaagcacattacaacagagccatttccccagcgccctcccaatcaatgttcttccatgataaaaactgtcagtggacaaggctagagagatggttcagtgatcagtatcgattcctggtcttgcagaggactgggtttcagctcccagcagtcatatccagtagctataactgatgctgaaggtcctctgctacacattcatcatcttgctactgaggtactataggcgcgatgctttttctgtggttatataaatgaaactttataaaatttaatttataaaaaaaattcaaaattcaatttctagtggtttgttgctaatatattagctcactaattttgacttgagaaagaatcttatctaacccagactggcaccaaactcacaagttagctgaatctagtcttgaactccttcatgatcctcctgcttctatctctgaagtattattaactccaattacaggggctctgataccctctgctctctataggctcctccatgcatgtaatgtatataaactcatgcaaacacacggaaatgtaactaaatacatcttttttaaaaattctcagctaggggctgagaaatggctcagtggttaagggcactggttgctcttccagaggatccaggttcaattcccagaaaccacatggtcgtttacaactgtctgtaactccagttccatgggatctgacaccctcacacagacatccatgcaggcaaaacaccaatgtatataaaataaaaataaattatatatatatatatattctcagctaataggaatagaaagaaatgctaccacaacaaagcatatgcacatacaaatcatagaaatgcttaaagtctgaaacttttctcttaagattatagtaaaacaagcccggcagtggtggcgcaagcctttaacccagcactcgggaggcagaggcaggcggatttctgagttcaaggccagcctggttgacagagtgagttccaggacagccagggatacacagagaaaccctgtcttgaattttaaaaaatcaaatcaagattataataaaacaaagaagacctttactgccagtctaaagcagtggtggttgctgttcatgtagtaatgttttaaagattgggggggggggggaaggggagacaggaaaaatattcagaagaatgatcaaaactgaagccacaaacactaagtagactatcccaaggaaacttaggtgccatggctaatctctacaaggactccctgcctcaaaagaaaataaaaactgtaagggcttagaatgtagctcagtgggagagtactgcctaccatgttccattgtgagttccatccctaatactggggagggggtgtttagaaaaaaagaaaaccaaaagaatatacaaaaggataacatatcaacagtagattgtttcaccaaactggtactatccaaggccagtaataaaaatcagtgtggaaaccgggcagtgtggaaaccaggcgcacgcctgcaatcccagcacttgggaggcagaggcaggtggatttctgagttcgaggccagcctggtctacagagtgagttccaggacaaccagggttacacagaaaaaccttgtctcaaaaaaaccaaaaccaaaaccaaaaaccaaccaaccaaacaaacaaacaaacaaaatcactgtgaaagctgtgtggagcacatctgtaatcctagcacttgggaaatgaagactggagggaggatcaggagttcaaggaaaggctcagctacctggggagtttggggccagcctgagttacagaagatcctatctcaaaataagacaaaaatcaatgtgctaatatgctaaaaataaaccagtataaactggaaatttgtaaagtcttgcttatataacagtaggggggaaagtcactattaaagttctacaacagcaaagtgataaatgtataacaaactactatatgcggaaaactaaaacaaagcaaagcaaagctaaaggggccttaatggaatgtgatgcccccagactgacctacagatgaaaagcaatccaaaactcctagcaaaaaatttatggacactaacttactgtgtcaaaaatttatagatgatttctgctttacagtacagaatgctcagagcttgaaaactcattctagcctggcatgctggtacatacctttagccccagcactcgggaggcagaggcagaggcacaggcaggcagaaacactgtgagtctgaggccagcctggtctacatagtaagttccagaacagccaaggctatgtagtgagaccttgtctcaaagaaataaacaaataatgataaagcaagcaaacaaagagcctgggcacagggagagcgatgccatggagagtccaaaaattcttcataatctctcacgatgaacatcggagaaaaatcccatatgcttaggagggtgcaaccaccttcaaatatattcagccatttcaaaatacataagagtgttctgtactgaacaaggctcctgcttaaaaaaataaactgctttgtcaaggactaaaggagatgggaaaggggacagacatatctgggtacccaattccagcctgaagtttccaacccacagctctctcgtcatcacatctcacttacatggagggggagagataattaggagggtgggcaattgtacttcacaacccaggagcacacaagcagtaaaagacagaataaccagggacattcagaacatgtcaaatcaccacgtatcttactaccacagccctacaggcctatgtactgtagttccttttactggctacatcatacttgactttcaaaaaaacctgagaaatgagggggggagacagacagagagagagagagagagagagagagagagagagagagagaatacaaagcacatgccctttaactgtcaaattgacacagtctacagtcatctgagagactgatcaaatcacactggcctgatgggtgccatcattccctgggtgagtggttccgggatgtataagcaagctagtacgcacaggtgagccagcaagccgtattcctccatggtttcttcttcaagtccctgcttgagtttctgctctgacttccttcagtggtggattaatgatctggaagtacaagccaaataaatcctttcttcctctactttgcctttggtcagtgtgttatatgacaatagaaagaaaagtaaaacaaaacaataaagacaacacagtttaaaattaaaaaatccagcatgtattagtatcagacttaaatacgtactgaatgttggaattattaaactgaaatatttgcctgtttttcagtgtcagttcaatggctgaaagtcaattaatagccataagtttgatggatcaagtctgaagcagaaagattgggaattccaggccagcctaatccacatagcaagaccctgtctcaaaaacacaagaaagaaattgatatgaacacagtctcagagcccttggtgttacccgaagggtggagcagcaggatatttttctcctgagccttacaaaggtcatattgggggagtcacatgtccagtcacatactggagcctaacctgctgggtttcttgccttcaaatctccatagaacttaagtgatggtattgttacatctcagaaaggtcagattcatcactgatgtcctgataaccctctcgttgggaccacacatatggtcttttctcataattggctgactgactttcagtagctgaatcaaagtcctgaaccactgctgtgcagaaagatccatcggcacagtaacgttttttacacaagtggaaataacattctaaatttgagtctcgggcgctatattgtttactcttcaaaagtaccatcagtgtcccaaagaatatagcattcccaagattcaaatatgtgacttcctttgcctgcatgcagaaccatttaaagtgacttatagtgtagccgcccgcgtaatgccctgttcaaagcttcctttgtttatgcagtggcaacagttgccctgtatctataattaataaagattaattgctaatatggactattctggtcttagtaagatcctatgcaaatagaaattattacttttagttttgtttttatttattaaaattttaaatgagatttatttcattttgtgtttgtgcatcacgtgtctggtacccaaggaggtcagaagaggatttggaccacctgggacttgagttacaaaatattgagaactcccatgcaagataccagccatgttagatcctcatgtcacaaaaaaattaagtggagaagctgagcttataatcctagctatttgggaggcagaggcagaaaaatcaagaccagcctgggttattacacataaagtaagagagacaagctgggcatggtggtacaagcttgtaatcccaaagcttggcagctagaaatgggtagtgagggtcgtggacagcctcaactacagaagacttcattaaggggctcaaaaagtgggcttacgaccgcctgtaactcgagttccacaggattctatggcttcttctggcttccataactgtactcatgtgcacattcctacacacacaattagaagcaaatcttaaagtgggaacagatctagatatagttcagtggtagtgtgactgtctagcaccacagtgtcctaggttccacaaccaatactggggggaaagggggaaataagcacaattactaaactaaaaatgatgcttaatctacgggatgacaaaagagtgagccgcaactgtggagaaatatggcaaaacgtcaactctaatattagggtttcattttattctctgtgtttgcatttgtgttaaataggtcataatatataaagctgccgaaatgttttaaaaatagcaaacattcctttgtcaccctcatacatatatgaaaaaaatgagatcatattatcctacaacttgtttttaatgtaacaagctatcatatcatcttttacaccaaagagccaaaatatacagacttttaaaacatcctcctattaatggatacacaggttgtttcttatcacttgccacaagaaaagagctgcatagacatcctcttttaggtatccttatttatatactgatgcttctctttctgaaggattgagccgtgaaagtcagactactgagttccagatattggaacttggtactccatatatatttttatttttctaaatatagctacatcaatgcttccaaatggttgcaacaattcatactttattcagcaatgcctagctaaggtactgaaatgtctttttgaccaagtaagcatctaacaaaagaacacagatcaccctataaggccctattataacagatgctcccagaccacaaatttagtaacatactctggtcctcatttggagtacataaaaagggcatagggcaaaaagcgttattataccataattaatgttaccaataagctagttttatcaactactaagtgttgatgagaaagaactgaggccgtttttcgaggcctctggggagctagaataaacactccattttggagacactcactatccgtcaaaccccaattagacaaaggaaaacaaaaggaaacctcaaaacacgatctctcctaggaatgagcctccccagcctgacaggttcatccgtggaggtccggtgatgtgggcactgatcactcatctattgtgggcggaataggggagaaatccggagtgccagccgccgactactcgtcccgctcggcagaccatgcggtcggagtggtgaccgctgcggcgggtcggcgtggtgaccgctacggcggccatctctctgacagcgcgagacccggcactcaccagggcatgttcattaattggccagtttctccactctccttattaagtcatcctctagctgcctggctaatcccgggaaggacgtatacatgtggacgccgccattttataagttacagaagcctggtggtgccgtgggggggggggggggggggtcgggcgggcggagagcatgcgtcacagccgaacagtccctgtgccgcgcggcgccgcgctgtcaggctgtccctaaatggctgctccagcaacgtgaccgggactgtccgcggtcgcttccgcagatgactgagcgcttgcggttcctctcccggctgcctctgttagcatctttcacgtgctcccgcgtttcttgcccgtctttaatttgttctcttgccaccccctcaccccccaccccccaccctacccccaccgaaattcctttttcttttttgtttctatagaagaccagcttgtgttttgctcccgagatctctttcggagccccttctgtgtttttagctgccagcattgctgtagctgctataactgcaatctacatgtcacagaggctaggtggcaaagtaaaccacaggcctgggtatgtcccctagtttttgataaagacagaattataccttgtcctattcctattggacacctcacagggccgaagctgacaataactcctttggcttttggatgttcacaccaatactggttaccacacaaattagaaaaggatcttgggttatcaataaaggcagagaactacacttccatttaaaaaagaaagaaaaaagttctcattttacctattgcaccacgaggcacaggggcagaagcgagtgctcagtggttaacagtgcttaatgctctagcaaaggatgcaggttcagtccccggcacatacttctctctacacagatctctctacacaggcaaacatgtatacacacacacacacacacacacacacacacacacacacacgaagtaaatgcatgtgtgtgtgtgtatttaagtaaaaccatgttggaaagttgccgaaggggcctcagtgaatatctgcttgaggaaggctttgctaaggcaacctgggacagctgtcatggagccgagggctgtcctctctccagaaggtagcacattttcccttacactggtttccctctttcccaagacagcaaagccctggcttcttttcattccattacaggcagttctttcctgtgcgagctctcctcagctgtagccagaatttgcctgtttggaatcctttcttcctcctagagtttctctgagatggcaagtttgtgaaaattattacacacacacacacacacacacacacacacccatggccaagacaatcaatttgatatgctcctgtgactataaccactttattgcccccccccatttaaatttttaatctagattcccttccccctctctccatgtgctcatggccagcctctagttctctactctctctttctctctctctgcctttccctgcctctgctaccctcttaactcccctccccatgccctgaataaactctattctatactaaaaaataaaattaatctaaatataattacatattctcccccattcccttctccaattcctcctatgttattcctcgccactacacacacacacacacacacacacacacacacacattgcctctcaaatttctggctttttgtatatatgtgatttttctctgggtgcgtatttggtttctacttatctttgttgttgaacaccccaaaagcagggctggagagttggcttggtgtgtaagagtacttaatattctcacaaaggactggggttcaatgcctagcagctgcatgaggcttctcacctcctctgacaccatgctcgagtgtggtacacagacctatatgcaggcaaaacactcacacacataaaaattctaaaaaaaaaaaagtttttataaacttaaaaaaaacaaaagtcaaatataaaagttgattcagggtatctgggagcccaactgtctgcatttccaacttcattctaatgtctgtggcaaaactgttgaaagaagtacctaggaaagtgtgactctagctaatttttaaagatttggcttttcaggcatgcatatcgttgttgctcttctgtttttgagacagggcccccgttattccaggctggcctcgacttattacgtagcagagaatgactgtaaattcccaattctccttccttccccgggcctcactttatcttctacaaacttcttgtgacatactcaggcctttggcaatagactaaaactttctggttttttccctcatcacccctttttgtccatatgggaacaatcttttagttttaggataaaaaccttatactctattctcatctaaaagtatttccttaatttcctttaattttctttatataaatgacctataacttcttacaatattttacatttatttatttttgtgtttgagaaagaccaaggcggggtagaagaagggagagagagagagagagagagagagagagagagagagagagagagagagagagagaatatatggatgtgtccaccacatagtttccaaggatggagctcagggtgtctgccaggctttgaggtaagctccttatcagctgagccatcttgcagtcaagactcagcccgtgtgtgtgtgtgtgtgtgtgtgtgtgtgtgtgtgtgtgtgtgtgttactaaggactgaatccatgattttctaattacatgctaagccattgctctaccactgagccatattgccagccccaagaaaaatgtttttctttctttctttattggtatctcaagatagagtttctctgtgtagccctggctgtcctgaagcttgctctgtagaccagactgggaatcagaaatcctcctgactctgcctactgaatggtgggattaaataaaactattctttaatattctaaatgaaaatcaaagaaaagctgagcaaagtggtgcttgcctaaaattccagaatttgagagagttaggaaggagcatcaggagttcagctcatcttcagcaacacagtaagttccagatcagcctgaattacatgagaccacgtgaaagaggggtggagagcaaagccaaagcaaaccatgaggctgtatatgaaacataggaaacaacatgctatcagtctttgaaacagtcctgtgttttcttacaatttaagttgcactgttgttagaaatttatgtcctgttagaacaggttttcagaaagtgcttttgctaaaggtattgatggcctacttggcttcacaaggtaaccaaccacaggattaaagacttgagtctctgccttcattttgagtctgtctttccgttcatttcaaactcctgcttgactgtgcataggcatattaataacagaaggagtgtcttcctaaattatttcattcatccttagtcatgttgaactccaagagcaaaacctcccaggacagaccttcttccatatgagggcagttatccatgatgcaaggcaaaagtaatcagcttatgcttcaaacatgagccaccctttaaaaaaacaagaactctctcaagacatagtatggtctcaagctcaaagcaattcttctgctgggattataggcatgtgctaccatggccagtcaagatgagggtttctctgggctatcttgcagtaccacaagacacaataattagtcaggctacacctcgaagaaaattacttttttttcataatgagctacaatttatttatttattgaatttggagtattcctcgatatcatccttggcctaagattctttgccatagtccttaaccactacgcaacagcaaccgaccaccttccgtggtttcccctctcgatcgattctacagaggcctacccattcccctagtttcttgttgtcatcaacctttatcaggttgatttggtgctcagcacaaagtgcctccaccagcttgacatacatgggctcatcacagttggatgcgagcacacagagatgggcttggcgcttgtctaactaaggctttggcagcttcgagtatgccacgtgctaggccatcctggatgagggcggtcttgagcacctcttgtagagcagtgttgacgtccattacacctccagcagctatgccttcctcggccatggcggtggattatgggtgacgccgaatcttgaacgcacctgagcttctgcctccgcgcaaattggtggcggcaggggaaaaaagcgaaaattacttattatgggtactccttgttctctattgaaatgtctctcctatttttagtttaaatctcaatactccagcgataggggcagggtcgttgaacccttctatggctcttaccacttgaccacctttgtcatcaggttatgctactctaagttactccatgttatataaaacattattagctcgtgaggtcaaactgccagtggcctattctttaaagaaaactgaacctggatcgtctggaaaagcagcgaatcctcttaactgttgagccatctctccagccccccaaatgtattattatctactctttctgtttgtttgtgtttgttttcaaggcagggtttctctgtggccttggctatactggaactgcctcggtagactatgctggtctcaaactcagagatccatctgcctctaactcccaagtgctgggattaaaggtgtgcacctccactgctcacattccatgggtttatcttaatcacatctcttttattcatattgcaacctcaccagtaccctcagtaacgtcatttaaataaaacaaacaaacaaacctgggactagagacatacctcgatgcttacaaacatttgctactctttcagaaaatccaagtttgattctcagcactatcaggcagttgacaaccacctataacttccgctccaggggctttgctgctctcttctggtctttgagggcacacacagaccatatacataactaaagtcagaaataaaccttaaaaactcaatacttttcaatgatgtaatggggatctaaagagatggctcagaggttaagtatttgccataaaagcatgaggaccagagttcaagtccccaaggcgtgaacccatgtgaagccctcctataattgcagctatgaaaggctcaaacagggatccccagagcaagttgcctaacaagacgtgccatatcagtgagctctcggtttggctaagatcttgcctcagtaaacaaggtagaaaaatgattgaagacattaaacttaggcctatatattcacacacatatacatatgaacctatatacatgtgtatccacatctatggacaaaatgcatatacacacaaaaatggaaaaggcaagggtagagtgggaagatgaacaaatgttttctttgctctctcaaccttggttataaaatacttcctttaaataacagaaacttaaaaaaaaacaaatcaggtatatagctactactgctggacttcagtccatgcccctcccaatacccactcatatctttccttcatcttattcaataagcattcttaagttttctgtaatataaatcaagaatcacaacaatatataactagagagaactctgcggttctgaggattcctcaggttgcataattgtgaccatcaacttgcattgcctgctcctgtgccaagactataacaccggagtatgtaatccggagtatgagctgagaggggaaaaactgatgtggcaagtggaagaacagatatagaatctatgtatttatttacttatttatatataataaaacacttatacttatcacttatatctgtgaccggtagcacatgcttgtaagcacaacactttgtaggcaggaagttcaccataagttcaaggctagtttggtctacatagtgaattccaggtcagcttaaacagtccttggaataaaagaagccacagagatggcttagcagctaagaacacttgctgctacagcagaggcccacattaagttcacactcctctgagacccatccaccatggctctgcttcccaagtgctcgtattaatggaatggatcattacatcttctccaaaacattattatttgtatttacatttgattattacatgccaggagggttttgttttttgttttgtttggtttttttttttttttttttttttttttttttttttttggttataattggtactctataagcttcttgtatgtttataggcttctctttctttattcttttcttttttatgaatgaggcaatttattaacccagtattattttttctaatgcttcttgttggcagctgccacctgttcagcgatcctgtccagatgtgtttcctgtccctgaggtgttagcttgcggcccccatctcggcccttttccaccattttcagccctttcagggcttggaggacctggcaagccatactctcagagcctctgctgaagtggctgggcctaacaccgttcctctgccatccttcatagatcttggtcacggaaccaactcctgcactacagttgtgtacagaggtacaggtccggagttgtggaagcagctcgtgggtagaaccagttctcatcatatggggcaagctctttatgtttggctaacttgactgtgtccacccattcccgaactttcagcttcctggactttttgaggaaggctgccagcgctctgacgaacctgatggttaacatcttttacagtgacttcaggcatcgttcagcctccatgctgccagccaggggaaagggtggcatctctttaggttgggaaaattttcttctgattttgttgatatttttccgggacttggagctggggactcttcactttctattactataacttataagttggtatgcctgttttatgaggtgctggagattgttttttgttatcttatataaagtctgtgaagttgcacatgaaagcctgatctttagatcccttagcactgaaattacaggcagtaaagatttgtctagtgtgagtgtaaatcttgaactttggtcatctggaatattaagcatctcaagagtaatctaagagcagtcttaagcaccataattgatcacttcttaggtctggggactaaagacatgcaccacgtccacctggttgaccacactttaagagatagcattgtaaaggggctttctaatattttctagggttaaagtctattgtcttcatggtagggagcatgtcagcattcaagaagacatagtactggagtttgacatctggttccacaggtagtaggaagaaagccaaccaccggccctggcttgggcttctgaaacctcaaagcccactccctagtgacttatgtccttcctaattcttctaaagtagtgccacctcctccccgctcctgatggcttagtgataaaatgtctgaggctgtaggagtcattgttcttacatgatctttggtagattgatttctgtatagggtgagatagtaccactatgctaaggatcacttggccaagtgactgtatgtctcttacatgtggtgtttgtacctttgttgagtagtggatggctgtctccaggtcctctattctatcccactaatttacaagcctacctatgagcagtagcatgttgacgctgtggtgcaacctgttcattcatttgaagctttgtcatgtagctcaatctggtctccaattctctatgtggctatttctgatcatccttgtaactcccaagggctgggattcacaggcataagctacttaccatgtcacctatttttaaaaactatttatgtgaatgtcattagaattttgctgagtatagcgctaaatccatagatgggtttttgatgcaacttagacaatattatgttgattcatgaacttgggagtgtttcttcaaccattttataccagatcaacccctctcccaatatacgttagaattgaaaaaaatatagatttcctggagagactggatgcctgatctacctatagttgtggctccaactttctctctgttcacagagccagtagtgtcattgaacatcccttcctttaaaaaaacaaaccatttttcatgatttattttgatcatttttccttcctccaactcttccccactcatccaaatccatattcattttcttaaaaacaaaacgaaaactgcgctgttttgtctggatggtgttttcttggagtcatttactgcagtctttctgactccttatcttcatagatgcctgagcattgaaagaaagggcttgatgaagacatctcatctaggaccaagtgttctaaagtctcttactctctgcacattggaagaccatttcttaactcccatttctgtttcttgctgctttgtagtgggtccttgtttcttgacccattatcatcatcatcttgttcttccttcttctcctctttgaatttgcatggagaattcctcaagattactattttaccccaggtgcatttttaatcttaatgttaagaatatgcaatgaggcaggcagtggtggcacacacctttaatcccagcacttgggaggtggaggcaggtggatttctaacttcgaggccagcctggtctacagagtgagttccaggacatctggggctatacagagaaaacctgccttgaaaaacaaaacaaacaaacaaacaaagaatatgcaataaattacctagttaagtgtacaggaatggaggtgttttttagaaaaatatttatttaatgtgagtacactgtcggtcactgttcagatacatcagaagaggttagatatcggatcccactacagatgactgtgagccactacgaagttgttgagaattgaactcaggccctctggaagagcagtcagcactcctaaccactgagctatctctccagcccaggaactgagttttagcacatatcccttcatgctttcttgtgataagactaaaaagtgtccccgaaacctgacataccttgatgtacacggtgtgagaaagaatgatgaggtttgcaagaattgggactaagtaaaacacagagactaaatttaactctttaatttgatgattctctctagcatccccacaaaaatgatacactggcttgcataatctgtgaccagtacctcgcaagttctaaattctctttgtacagctcatttagaagttctcgtttatacaaagccatatccatcgtggagccaggtgctcttagctgtgaagagcccttccttgggtcttttttccctaatatgtcctatgtgacttctcactggtgatgcttttggtgtgcttgttactctgatcctgatcgctctgtcaactaaagttagacaaagtaacctttacttctcaattcagataggaatccttttgcactccaagtttggcttcagatgccttggaaagattcatgctgccacctgctggtttattcagtctgtgtgcatcatttatttacttgttaatttgtttttcttttgttgaaacagtttattttgtagcagatatttttccatccctacctgaaccacctcaatagtaagattagtgaattgctggcactttgatcgtccataagcaaaccaattttgtgtcctttattattcatgggacgcctaaagggaacttagaacagactgtgaattatttgtcagcgtgaatcaacgagacaacaatatcctttgattttctaatacccagggtgtctgatctctttcatgtggatattcatagtttgacagttaacaaaatttgacagttcttttaagttagcagtgtctctggggcgagtaagataccaatgagctattattccctcaggctttgctttggcatttaggaattatttttcattactgctagcgagtaacgtacttcagtgcgtttttgtcccaaggtatggagtcaccaggttcccagagaaagactaagatgccaatgacccaaaactatgagcgtaagcccaccaaatcggtcacaactaatactctgataatttaggaaccaaggagccattttgtgaggcatttctaccctttcctctcctcatctgaggtcgccaactaatgcagaagaacttctagtgtccaagacgcggagcgatacatggtttgtccaagtagaagatatattgaaattttgcatagacaggtgtgtgacctaatgtacattatttaatgtttatgtggaagttctacataaacgtttttagctgtaaaataggataatccttcattatcgcgcaaaataatgaaattcacgcgtcatgtcactgagcttacgtacctccatctttattcattttaatttttttataatatagttagacctaaaggtccaataagatgtcagaattgcaatctttgtggccactcctcttctggtctctccgccttcagcgccgcggatcagttaaaggcgtgcaacggcttgctccagccatgtttgctcgtttcccgtggatgtgcggttcttccgtggtttctctccatctaaggagctttgggggaacatttttagttcccctaccaccaagccttatggcttatttaagaaaacatatcaaaattccacgagatttttgacgttttgatatgttctggtaagattttttttttgacatgtcctccatactttttgatatttgtaatattttcagtcaatttttcatttttaaggaatatttctttgttgtgccttttggttgatacttgtgtgtgtatggtggacttacctttctttcattgtttatatattcttgcccatcggggccacggatacctgtgtgtcctccccgccattccatgcccaacggggttttggatacttacctgccttttcattctttttttttcttattatttttttttctaaacttgcccatctgggctgtggatacctgcttttattctttttttcttctccttagcccatcggggccatggatacctgctttttgtaaaaaaaaaaaaaaaaaaaaaaaaacctttctcggtccatcgggacctcggatacctgcgtttagtctttttttcccatgcccaacggggcctcggatacctgctgttattatttttttttctttttcttttgcccatcggggctgtggatacctgctttaaattttttttttcacggcccaacggggcgcttggtggatggaaatatggttttgtgagttattgcactacctggaatatctatgcctcttatttgcgtgtactgttgctgctgatcgtttggtgctgtgtgagtgaacctatggcttagaaaaacgactttgctcttaaactgagtgggtgttcagggcgtggagagcccgcgtccgccattatggcttctgcgtgatacggctattctcgagccagttacgccaagaattaggacaccgaggagcacagcggactggataaaagcaaccaattgcgctgcgctagctaaaggctttctttatatgtgcggggttgcgggattcgccttgatttgtggtagcatttgcggggttgtgctagccggaagtagaaagccaaggagtgctcgtattagtgtgcggtgttgcgcggaagccgcagaggactaggggatagggctcagcgtgggtgtggggattgggcagggtgtgtgtgcatatggacccctggcgcggtcccccgtggctttaagggctgctcagaagtctataaaatggcggctcgggggctccacccgaggctcgacagcccaatctttgttctggtgtgtagcaatggattataggacatttaggtcgtacaggaaaagatggcggctcaagttcttggtgcggtataacgcaaagggctttgtgtgtcacatgtcagcttcatgtctgagttagcctggagaggtggcacatgctcttgaatgtgtctaagatggcggaagtcatgtgacctgccctctagtggtttctttcagtgattttttttttggcgggctttagctacttggcgggctttgcccgagggtacacttggtgcattatggtagggtgtggttggtcctaccttgtgccactcgaagctgaggcaaggctaagtggaagtgttggttgccacttgacgtaactcgtcagaaatgggcacaagtgtgaaagtgttggtgtttgcttgacttccagttagaaatgtgcattattgcttggtggccaggatggaattagactgtgatgagtcactgtcccataaggacgtgagtttcgcttggtacttcacgtgtgtctttagtcatcattttttcgaagtgcctgcccaggtcgggagagcgcatgcttgcaattctaacactgaagtgttggatgatgtcggatccgattcgagagaccgaggctgcgggttcttggtcgatgtaaatcattgaaacctcacctattaaaagaaagaaaagtatctaaggccatttcaaggacatttgactcatccgcttgcgttcatagtctcttacagtgctctatacgtggcggtgcaaactaaaactcagcccgttccattcctttgtattgttcagtggctagtctacttacaccttggcctctgatttagccagcactgatctcaagcggttctctaagcctactgggtataagtggtgactttggccagagtcatagtggatcacaaatcactggtgaagaggtagaatcctaccttcttccaaaatctaccccatgactattgctggggttgcattttgatttcaatgaatattttggatgccaacgacacgtctgatagtgtgctttgctagtgtttgaatttaaaaccgaagtgattgttttcaaaatgtatttacggatttgcttacttgttgaattcattttaattacctttagtgaattgttactttggagtccttaaagttttcaataatttttttggcagatgatactcaaattacttggcacttaaatgtactttctttcaaactcatccaccgagctactcttcaaatttttaagtcttataacacagatactgttaatgtaaagtgaacattatgactggatgtcaggagtatttgaggttctataccagttcaggctttgcttttgttgctattgttgatgctatattgactaatggttttacttgtcagcaagagccttgaattgtaatgctctgtgtcctctatcagacttactgttataatagtaatattaaggcctacatttcaactttctgtgtgttcttgcctttatggcatctagattctcctcaagactcagcaaatagtgctgctgctattgctgccccagccccaggcccagccccagcccctgccccagccccagccccagcccctgccccagccccagcccctgcccctgccccagcccctgccccagccccagccccagcccctacccctgcccctgcccctgccccacccaaccaacccaatccagtccagccctgccccagcccagtcctagccccaggcccagatactttcagacctatcccaagcccacttctacttagagaaattcgaatcttcattgattcagtgctaaaatgcagtgtccatcactcagcctataagactgagacagcccatctataccccctccatactgacttctagagtcatggaatttcacttaatgcatagaatcgtattgctaaaatgcagtgcccatcactcagcctataagactgagatagcccatctataccccctccatactgacttacagagtcatggagtttcacttaatgcatgcagtcctattgctaaaatgcagtgcccataactcagcctataagactgagatagcccatttataccccataccccctccatactgacttctagggtcatggaatttcacttaatacatagaatcgtattgctaaaatgcagtgtccatcactcagtctataagactgagatatccctatgtataccccatactccctccatactgacttccagagtcatagaatttcactttgcatacggtcctattgctaaaatgcagtgtccatcactcagtctataagactgagatatccctatgtataccccatactccctccatactgacttccagagtcatagaatttcactttgcatacggtcctattgctaaaatgcagtgcccatcactcagcctataagactgagatagcccatctataccccctccatactgacttccagagtcatggaatttcacttaatgcatgcagtcctattgctaaaatgcagtgcccatcactcagcctataagactgagatagcccatctataccccataccccctccatactgacttccagagtcatggaatttcacttaatgcatgcagtcctattgctaaaatgcagtgcccatcactcagcctataagactgagatagcccatctatacccactccatactgacttccagagtcatggaatttcacttaatgcatgcagtcctattgctaaaatgcagtgcccatcactcagcctataagactgagatagcccatctatacccactccatactgacttccagagtcatggagtttcacttaatgcatgcagtcctattgctaaaatgcagtgcccataactcagcctataagactgagatagcccatttataccccataccccctccatactgacttctagggtcatggaatttcacttaatgcatagaatcgtattgctaaaatgcagtgtccattactcagcctataagactgagatatccctatgtataccccataccccctccatactgacttccagagacatagaatttcactttgcatacggtcctattgctaaaatgcagtgcccatcactcagcctataagactgagatatccctatctataccctctaccccctccatactgacttccagagtcatggaatttcacataatgtatagatttctattgctaaaatgcagtgcccataactcagcctataagactgagatagcccatctataccccctccatactgagttccagagtcatggaatttcacttaatgcatagaatcgtattgctaaaatgcagtgcccatcactcagcctataagactgagcccatctataccccataccccctccatactgacttccagagtcatggaatttcactttgcatacagtcctactttacttgtccatggacaagtaaacaaagaactcttgtccttcatgttaatcaagatacaccaatcaaacaagagttttatatcagagacttgccatggaggtatcatctctcaagtctcctttcctttaaggaaagaaaaccattctgtcattgctgtagtagtcacagtcccaagtttctaagcagtgttcagtcgtcttttctcatgtattaccttgagtactgaataattctgtcagaaatattttgtccattggattagactttagctagtccagccctgtgtgcatttagcaaaggggcaaacacaggtctgttatcagacagttaaagtgctcagtcccaattttcaaggcattggccattaaagggggtagaatactatatactgttggcatgctgtcatgggtgctatcgccccaggtcacatctttctaactgatggagatacatttatttgctcatgatattgtatactagtctcacatgctttcttatttcagccaaaaacctctgcactggaacattttatgtggataatcctgactaggaattgagtcttttctcaaggtcctaatactacccttgctttatgtaaagagggtgctgattacttaatgcctcttacacaattgtgcaaaattgcagttgttcaagtccccttctgttagtaaccaagatcccataccctcataccctaatgggtgacaatcaagggtgccaaccaatgagaccacttctctgttctggtctttctgctgtgctggggaatcaaaccttgagtcttgtgtacgctagtaaagcactgtcatagagctacagccccaccgtgtggtggtttgagagaacagcctcttatgtagcctgggctgggcgggacttacaggcattgccacctgtaatgtaaacatatttgtgcctgttgtgtgcacagctgcatttgtccctcttcctaagcattggataaagaaaccaaactaagtcaagtcattttgttggtaatcaagaagacctttgatctgtcctgtttttaacttccaggctggcctggaacttagcatataacccaggctagccttgagctcaggatctagcctgcgtttaacaagtgttggcatatctggttcctaccactatgccctgcatgcagtctttcatattgtgaatgtgcatatgtcatttcactgtagtaatctgcatctggtgaagacttatttgtattgcagcagtatttaagatccttaacatagtaaatgtgcacagtgttaactctattgtacatattctcatgtccacagttgtgccttttagatcaggactcctgtacttagcaaagcaaagaggctcactaatataaagcttctttcatgagactatagattgaaacgattccaatacggtcaatggtccttcaaggtaagacttctgtctctgatcattcatatcctctttgctttatggaattatgtatgtgctgtgcacttgaaaccccttcctcaaactatttatgtacatactggcaattttagtaggatcaattttactcttaactttgaagtacagaagtggtgttgacctataaggtcccattttgtggcttgctaataataatgactgattgtagtaggccttttctgttcactacagaaggaaacctgaacagcgtaaaactgtaatggccataaacatgtaccttgcatattagtatgcatttactgcacacatctcattccatttggatacgatcctactctcaaacccttttgcagtacagcaagggtcactaatcttttggcttcttcatcttcctggacactggataaggctgtcccctcctttccactctttaatttccaggactattactttaaagacttaatatttgcataaaggatggggtttttaattgataacatgtcccttgaacattaatgtatataacagggacatgatccattcattttaataaaaatacttggccagttaatgtgtaaaattacacttatccacaaccttattacttttcggaccattgtatctcttgcactcctgcaagggataccgtttatctcccaaggtccctgctagtggaccattaatatacagtgaatcttcctttgtctttgccagtaaacaaaggccatactccttcgcctttcatttgcactatatcaggatatgctgatcaacaaggccgcattcttttggactgttatcatatattaaatgtatgcgtatgcactgccacctgctctgtgcacttgaaaggatcccactcacttccttagcaccttcagcaggaagtgataataagctcaagactttcatttggaaagttcacatgtctaagcacttctctaagaactactgtaccctcttctccgctttaaagcagaaagagggttgtacgaagtgctcttcatttggacttaagtgcattaatgcagttagttgtccatcattacctttggagttggattttacatccttgtactcttttgacaccagaggcatattaattatttctgagcacttctcttgtcaatattaatctgtacccttacacatatgacctgtgcggcagcaaaggttctgaaatgcctaccttttgactggggctgctgagtggtagtaactattagtaacctcagcatttggatgattactatgcaaaaatgtcaaggacctgtgtgctctctttgcataccatcaaggctactgagtcccagaattaattgctaagttatgcgtatttataactatgaatgtctggaatattttgtcccctttacattattgcagaggttgctgagcccccgaaactacccggtactgtcaatgagcacaggggctctgacgaatgacctgctctcttccttaaactgattttgggactcttaataggcacaatggcagttctggatggtttattttctactccaacttgagcaaatcccctgctagtttcccaatgatataataaagtacagcagtatgtacacccaacaatgacccggatttcgaccctttttgcattgctttaatatatacaatcctaaatagtcacaatctcacactttatagtgttccttttgcccggcctctagtttgtccattgaccacttttctgaatcactaattctcacaaacccatcattaaggaagagtttgtgccctttctcaattccatcatgccatcccttttgcctctttgtttgaacagtattgactgggcaaagcccttctcttgacttaaagtcaacaacaccagtttactcacttcatatggctacagtgtctcagttgccttctccttgctcccactgaacagagacacctcgaattcttacattattctgggtaatgttaattaccccaaacaccctatgtgtcattaataaattttggtgtatttatacactgaatagcaaaagcaggccaaaactaggtggatgagccttcaatctttaacttgcacttctaaattattccaattccaactgctggcacattctagggccaggaaccattcttgcctacctttattaatgctttattgtgcaaaatattgcaggcaagtagctcagggagttggattgccaccttttacttggggctttcctttacagtatgaactgaaaattgtcttcctgagaaggaagcttagcacttttctttccattcttcctccaggaaggagccaactgtctgcttaagaaactttaagcccgattttgtatattgctactgtacaggaccaactgccagaaaagttattgataattttattccttaagaaaggcatttggattgcaaggtggattgactgtgagatcattagcttttgtgaagtaaaaatagccatttgtgtcatgtttctgaagactaagcagtgtctcagtgtactgagggtgatgagtctgtggaaagatcagtgcaactattgcagaatgtttaagacaagtatctttgcttggtctttactacaagtttaacaaaacgaaaaagtcaatctttgtgtggcctttagtatgattaactttttggaagatgacctaagccttctaatcattatattttgtctgacattggtcaccagtccttgcttatttttaaaaggtgactggatggattaaatttgagaacatgtcaagtcgcctttgaaaattatataggccatcacatttaattaattcattctatccaccattaaactctggcaataatttgaagtagcttgaaaattcctaaagtgggaatttattttagagatgatagaacctgtttccccactttacattttaaaatatgtctgccaggatctaatcattcctttaaacgtacacttcaaagagagattttcctagtaagaaaagagctttctctagtgtgaagggtgctttgtagccgccgagtacttaggtcttttttgggagctattgtgtatgagtgtatgtatgtgtgtgtgtacatgcatgttgctgcgcgcagtcattcattcacatggtgctcagacaacaatgggagctggttcgtctatcttgtgggtcctggagatcaaagtgagatcatcaggcttggcagcaagtgcctttaccctccgcgtgccatcttgccatcccgctgctgagtgtttgatatgacattgctgatgaaaataatcatcacaacagcagttctcccagcattactgagaaatgatactatttttctgaggaggatgttcaagtaactcatccagtgcaggatcctgcttgaactactgctcctccgttacatcagactctggctgtttagactacagtaagtactaccttgttagctactaagctatctttttctcattcgagtttctttctgtgccacccactgaaaagtcaaagtgactaataagtcactagctcttctcagcttatccatacacaacacatagtatgccaacgaaattgtagaattaacacattgtgtacccaatcgccattatgctggggtacactaaaatgagaagcgatgatattttacaaaatttcttccgtgagatgattatgttatttaagacttaatgtaatataagcacacttgagatcattttaggaaatgtactgcctgtgtgaattgtttaagtattttaggaagtctactggggttgaaatttgacttcttaaagagggaagtgtgcttactttgccttgttggtccagacgactattagtaccatctggttggtttatctgaatgccatctgtttctatctacctcttggaagcatggaaagaatattaagagtgaaagactccatgcattatgcttagctgtacgccaagggtagcaagagatgagcttgtgtaggaattgggaatataaatttgataatttggttctttcaaccatttttactgcatttctgcccagaacagaccactggacggcactaacagcttagacagagaacttcatagcttacaatctttttttttttttttttttttttttttttttttacaaaagtgcaaagaaggataagttttatgaacaaattttactatggactactttatgtaccctccttgctcatttttctttttcattaattaatcaattaattttgttttgttctctgttttgttttgtgacagggattctctgtgtagtctggctatcctggaactcaaactcaagagatccgcccgcagagatccgcccgcctctgcctccagtttagagtgttgggattaagggtgggtgccacactggacccctgccagcacttttcaacagatactttcagttaaaacaacaaatacttgactcctgtgtagaaaatggtctagctgaaaaaacatccttgtccataacacttaacatttttttgcatttgccttttgtacgtgcaaatgaccctctagtactttaacccttttaagtccactgtaaattccttcgcagcaggtttcccccaactccaaaggcttagcattgtctggctctctaggtgataatacatctagaactattgagtcttttaggaaactaggaccattgttgtacaagtaactgcttcaaaaggaaacatttgcaaggaaaaaaagctttttgagatgctaaagaatgtgtttggtgcactaagacagttagctaaagcttcggtctcaccttagcaccattggctacccaccccagtacatgcaaagtgaccccccccccaggcttgcctaggcacctagagctttcagcctgcctcctatggacctaaatagagattaggactcagactccagttagtggcctggaggaagctggtactgctgctattcacagtaaacccactatcactgacagttccctattgaaatgatcaagttgtgtgagcaggcagatcattaatcagggccaattctgtcatggcaacctagtcctacatgacctccacggcactgtaaaatacacacttatttgtagtaggacatctggaacatgagcttgtctgtgattgaaatgtccattaggaggtgccatcacacaaaaccatctggaggccatctttggtccccataattgatggaatacaaagagttccccaaattagtgtcctgacccagccctcactgtcagtaatcatgtaatggaaagccaccaactcgccatcaccatcttcaggctgcctgaactgtatacattaagaatgagctttcagccgggcagtggtagctcgagcctttaatcccagcacttgggaggcagaggcaggcggatctctgagttcgaggccagcctggtctacagagtgagttccaggacagccagggctacacagagaaaccctgtcttgaaaaaaaaagaagaatgagctttcttccaagctgtccaatggcttgacccagacttaggagtttgtaaacaaagaaccctgtagaacaagtgaatttgagaatgtacaccttcattaagtggtgggaagtggaagtagtggattttgccagctgattttacaaagccctgtggcagaaccagaccaggtctttgtatgcatactgccatataacctagccactgtccaacctgtgccctctctcccagtccagtgaacctcttctgcctgccccttacttagtcctctggctcatcccaggggaagatggctctatttgtgtagtcataagaaagttttgttaattttaaataaaacaggaaaagagaaagctcacttaagacgagagctggagagatggttctgttagtcttccagaggtcctgagtacaattcccagcaaccacatggtggctcacaaccatctgtaatgacgtctgactccctcttctggcacacaggcatacatgcagatagagtactcaaatatacaaaaagggaaaagaaatgaaaggcctttgaaatgtagacatgctttcaattttaaaggctgttttcacatctcttaagaactaggggttccatgagaacatatcctcaccctgagttcttaccaccaattgaaaacgctgacatgtgcatatgaagattgtattgctagtaatcaaattatcatttgtagagtttagtataattatcatttgttttccagggatgaatttggagtctgttttgtgctcctgcctcaagaagaaggattgcctggatttagaggagtgaagagtgctggagagagcccaaaggtatttccgttacttggttgactgagatagtatcttcccttaaaggtctaatgtgtcaagttatacctcctaagtaaatacctcattattttcatgtggaattttcaacaatttttgtagtctaatgatagccttgtatttcttcacagggacaaacaatccctatgtgagactcaaggactgccagcagcctatacagctacattacatctcagcagaacttctcttcaagtcctcgctactctgaacaaaaagcttacaggccacatggagaaaaaaaggtactttggagaatttgctatttgggggtttctatctgatctccagttcatcagagaatgagggggcaagtcaataaagcactccccatctcctggtcccctggcatagtcagttagccaatgagatccttgccttatgatgaggccttgaaatcatccccaccatgttatgaccaatctgtaacatttctgctctgaaatgcctaaaaggtaggttatcagaggaatgaaggccagtttctgacaccctagtcttttgtacttgatagagtaagtagatatggctgttgtcacattctgtaggcctgtcataattctggtctctgaatatcctcaaactcagaggtccaatgctacaccagtttctagggacatatgcaccataagcactgagccaaacaatgctattcaccttgccagtgttctggcatggtattgtttaaagcacaaattaaaagaagaaaataatttaacccctttattcccagagtatttgaagtacaaggactttaacacaacctataatctaaaggatctctcattggtaggtgacagaataaaagccagaaagaacttggatggagcaattctcatgtctctaagttaacactaagatctacaaatgtgaagggttcactctccaagcccctccccatgatttaacacaactgctggttactacataatgagacaactttcccagtattcttgatttcaagaattggcttttctttcacctcttttccagatctccccccagaattgtgggcttgctgctttgcagtgctggcgacctattccctttgacgatccctaggtggagatggggcatgaggatcctccaggggaatagctcaccaccactgggcaacaggcctagcccagatttcagtgagacgctttcctgaacccagcaaggaagacaaaggctcaaagaatgccaccctacatcaaagtaggtaagttttctgcaacagtgtaataattttaactttgatcttgttttccattaaagtcagccttttacttgagatatatacataaattttatctttttcccacatctgggaaatgtaactaaacagtgcaaatgtttcttctaggagaaaagctgctgcaatagtggcactgaccttcgaggaagccattctgctctatttggttctctctccagaagctaggaaagctttgccagctgtttacatacttcaagatgcactgctaccctactcatgccatataatacacaagtgagtagcttatttacctacctagctatttacgagtacactgttgctgtcctcagacacaccagaagagagcaccagatctcattacagatggttgtgcgccaccatgtggttgctggggattgaactcaggacctctggaagagcaataggtgctcttaaccactgagccatcactaacattactgatgatgaatgcctctaactacaaatggaaacctggctggaattgatacagaagtatctatcattaggcagaatttaaagagccaggatgttctagtacttctttcctggcattcatacagcttcttttgttctttgtagtgccatctaccaaatattacccttccccaaagcagcacagaaaactgggtcttcagcgtgatcaagcaatgtgaacacacaaaaggaaggcagctttataaatgacccgaggatcaacatgcctgactgcagcatcttaaaagcaatagaatgaggtaagtcactagcattgcagtcttctgaggatttgcatttgctggaagatggtgctgggtggagagcatctaatgtgataatgtgaggcagggccatgtacacgatggaagatgaacaggctttcacgttatcaaatggcctcacagcagcaactcaaactattatctgcttaccagttatatcacaagaggaatttagcttctaggttttgttgttgttgttgtttgttttggcttggtgccctaccattcttacagacttaaacattgaaaagctttaaatagtttatttcttatctccatctgtgaagcagccattagacttgtgaaggatgtaaaaaccaagcccccccttttttttaatagaagaggagagtgaagctgacaattaaatatgcagtcgcttatagtgtttgctgcttacagaagcttttaatccatgtaacagaatgttgagatgttcattctgtgtttaaatgtaatattccctagatgtatgccctttggcaatttagttctgctaagacctgtctgtttgtgaaggtcaaatgaaatcatgaatggaaagtgttgagtacagagcctggcaaatatgccctggagttgcatgactaggccatttggaagagttgacgggtgtgtcctatggtcctatgttaaggaaaccttaagtttaacgttgatagcctggtacagtgtactaatggcaatttttttctttgcccttccctgtttcttgttaccctctttctggtggtctttgcttactatcaatcattagtgtgtattgtgggtgtgtctatttcttgttttatgtatctattttttccttggtctgtgtgtctaattctttgttacatctatttcttccttgctttgtgtgtctatttcttccttgctttgtgtgtctatttcttccttgcattatgtctaattctttgttatatctatttcttccttgctttgtgtctatttcttccttgcagttgtgtctaattctttgttacatctatttcttccttgctttgtgtgtctatttcttccttgcattgtgtctaattctttgttatatctatttcttccttgctttgtgtgtctgtcttccttgctttgtgtctatttcttccttgcagttgtgtctaattctttgttacatctatttcttccttgcttttgtgtgtctttctttcttgcttttgtgtgtctatttcttccttgcagttgtgtctaattctttgttacatctatttcttccttgcttttgtgtgtctatttcttccttgcattgtgtctaattctttggtatatatatttcttcattgctttgtgtgtctatgtctccttgtgttgtctaattcgttgttgcatctatttcttccttgctttgtgtgtctatttcttccttgctttgtgtgtctatgtcttccttgctttgtgtgtctatgtcttccttgttttgtgtatctacttcttccttgtgtgtctaattctttgttacatctatttcttccttcctttgcatgtctccttctttcctttgtgtgtcttttctgtctgcagtgtgtcttacctattcccatgtttctcctgcatgttctttcttgcagagctttgagctttgtttcactttctctggtgcctgtgtggtctgctttgtcttcactagctatggctctctgttttatctatctggttgctatttctcttagcttttctttcactcctgcctttcgtgactcccctttgggtcacatgttgcatgcatccctctctttttcttgtgctcaccccacttgttctttgttcaagttctctttgtcagtccatttcagttttctttctgctgcttctatccttagtgaattcttgtttacatttcttccctgcctttcttgggccactttctctgttttcttttgtatttgtgtctctttgctattggtggatttcttatctcagcatcattctgttgctttgtgtttgcttgtgtttctatcttctactttcctcctttctgttcactttgagcatttcatctctttacaagtctgtgtctctcttgtattctaaagtaatcctttcttggatgtttctttgtatgtacatgtgcgtgtgtgcatgtgtgttatgtgtgtcatgtgtgagaggagcttcatagccccttcccaataggtccagaatgtcacccgtggagccgttcctcacaccagactgccctgagaaataatctaagacaaaatacatcattccgtccggtcaggattcaagtggctctgaagtgaacgcccaagtagaagacagaagttttgcgacttgagatttaaaaggaccaaaatacacagatggcccgtcttgagctggctggacagaatgctgacaacccaaagaagaggaactgtttctacaggacacctgtgacttccaagagcggggaactacgtatgtcataagacacaaaacctgagctaagtccaagcataagacctaaggacccaatcctatatggacagaatatttaagagataaaggcctatggcccagaactctggaaggatatttctatccttctatccccaagaccaagaagggaaattcgaagatgagacctgccccccaaccccagcatccctttccatttcttatatttctatttaagctgtcttcacttgagatgtaatttttcattgttgccattgcccataaaggaatacgtttttagctggatagtattgtgcaagggtctgttttaaactgggtcttagccatttgttaaattgttgatgttttacaacttccatttctcttcacatctgctccacttgagacggaactaaatccagccagtgtatatagcctgactattgaaacttccctaggaataagcatgcatacagatatgcatactgccatcctccctacctcagaagccctaggctgacaagaaaaggaaagcatcaggttgttagggggaaaacaatgtcaggctatctagagaaaatataaagagttgttccagaccaatgagaagaattagacaagcaatatgcagatgtgccaaccctctgagaagcaccagccagtgtcaccttctttctttgggcttaggtgagcagggtatggttttctaataatggtttggggacaaaatgaggtctgaactccctgctcatagtagtggccgagtaatttggtgcatttcaccaaaggaactcctgggtctaatacctacctttaaaattaatgatgagagactctaaggactacttaacgggcttaatctttttcgtgccttcctcttcctctgtaagagggaagttaaatgacacaggatgaaaaagtaacatgctcatagcacattggcaattatacatggttattatctgaaagtgtagagcttttcctataaggcatcagactaagtacctgaagctttgtgggttcatggtcttagttgcatattccttagttgcaaatccttttcaaaaggtaagaaaaaggcacactggtctattgcctgtacttgatcaagccctgatatgaatgccagggaatgtctgagtaacattaatttccttccctgcatattttttgtgctgaatactaaggctgtgatgcttcactgtggtcacccccaggtaacaagatattaccaggtaaccaggaaacgtatgaatacgtaaaccatgaagcctactgtaacttccaagtcagtgctgagtatgtattacatagtagctgaagtctacgcctctgtgtgctataggcacaaagattgctctaggaataacatgctttgtaaaaacaaatatatgaacataacggggcttgaatgaataacagtccatatacttaaggccagtgtgtttcttctgctttggtgaggctcagtaagttatattataccaggtagcagaagagaaaacacatggaaactgattttaaactacaaactaggtcactaatgcaggtgattgattaccctattctgatcaccttctaatttctgaatacccatgttcagcactgggaataacaaagggggacattaccacagaactagaatttacaaaagaatgcattaaataaagcattatacagctatcaattgttccatgtgtgcaaatgaatgactactaactacctctgatgtatccgatattgttttgggtacatgaaatattcatgagtaactgccatgaaataagaatgtttgcattccatactattcataaggaatgagccaatgcttaatttaatcagtcaaaacttgagtgataagggcatgttaatacaagaacatttgcccaggtcacattatggttgtgggtactttcttaactataaagcagttcagtagtataagacaagacaaattttctatagaaataaagctgcctataaaataggcatagtctctacaaaattttcattgtactttttagcccataatgggaagagtacagttaacaagctgggtgtggtagcatgtgctctgagctgaagcaacaggaccacttgagcccagaaattggaggctagcctgggaagaccataaggtcaatctcaaacctggaggctaaatattgtctcccatgtgtatattctctttcatgggtactggagagatacacagacgtacatttcagtgtgtccacacttgagaataatatgtacgttggcattttatgaactcggaggtaccatataaatgtaacaattcattttcttacttggtatcaatttccaggcttttaaaattctgccacatttattatactgtgaaaataaagtaaataagtaactgtgaaccactgaatatatgaagcattcaatacttgatgagtacatactgaatggcagtcatttattacaaaacagtgcccttgctaggcactgggatgcaaagagcattctcattgtcctgtgtatctaaagaaattatgcatgagattaatttataatttgtaaactgccatatatatgtgtatatatgcaatatttgcctggtgtgcaatgactttgcttttatcccaggcatgcacaacagatctgtgtggagctttgtgaagtctacagttctataaagccgggacctaactgttggctttatcagtgaacagtgattactttctaagtttcataatggctgaaacttaatcataatgcttatcacctaacaccacctaataataattttaccatgctatgtgttgagcgaacacatagattgctttctagcattatgtagcacttataggagtgaaatctagaccaaaacttcaattcacttcaatgaggaaatgaaaacagaaaaaaaaaatggatttgtgcaaggcagtgtgctaaatgttacactgagtggactatgctgtctaggatacttcccagctggcttgactgaggaggtggaaaaggttttattaatgacaggaactttttccatccagtttcttaaatgtttgttgaatgctgctgccagagatgaattacaaacaccttgccagtaaaggagttttatagggccagagtgagataatcccagagcatgggtatcagggaacaaaacgggaagaggccagagcatctgatggcatgtactcagtgtggcccagaacctctcgaactagatgtactggctggagggaccaagcatgcagaacacaacacctaatgaaacattgtatataaaatatgctaacctaggtcctaaaactaaaatgtgaggtggacctagtgtagatcactgatcataggagacatggtctcataaagcccaggctggttctaattggtgactgtcacagcttctcaagtgctgagattacagatgtgcttaacccatgcccagcctgaagaatatatctgattactgagtgaataatatttttaaagaattatatattttatgtatatgagtacgctgttgctgtcttcagacacaccagaagagggcaccacatcacattacagatggttgtgagcccccatgtggttgttgggatttgaactcaggaccttcggaagagcagtcagactcttaaccactgagtcatctctccagccttctgagtaaatattttaactataatggctgtttgcgaaacccaaccaaggccaagattccttcaacataaactggagacttcctagctaaggaagctccaaaagtcattttctcattggcctagcttgaagccaggacagacttaaagtctgtcctttaattcattacccattttccttttcttactgttgaagtgtttcaaaggagaatcaagatgaatcgataattctaaacgtatttgttcattgcctggctcagcgtcatgtgagcaagaagaatatactatcacactcatacttttaacttaagtgtgatgaaagtgcagttctaagtactaaaatttctaagtactgaaaagaacaaagacatttaaaggatgcaacccaaagtgtactttacctcagtagtttctgaggggactgcagtcacaccttgagactacagctctcactttagctgggaaaaacatcaaggtgtagaggaggcaagttaaataaaaagttgctcccctcctcatgggcatgcttggtagagtggaaataataaaagaggttctctatttcctcggttccacacattgcagaagatgctactggatgctaagtgcaacacatttgttccaaaagggcactcagtgtgacttacagatgccccggaaagcagagggatgctctttattaaacagaaatattagctcaaacgttttctagactgaagaacactttcctcatttcccacagtttgcctcagaggttgaatacaggaaggttattattcattcatttgctttattggttcgcctgttctacaaggatttgcatgtctcttaggccttcacttggctcctgagacatggaaaaaggaaacatagacatagggaagtgctggatggggggggggggtctcttttctgggtagtggcacgacttagtccttagtccccaagtaatatgcaatgtgagtcctcatcctcatgtcttctccggccactgcaatgagtgggaagctgggctttgtagcaagcctgaccctaaagttacagaagccctccacgctaagaaactcaattttctaggccattttagctatgactgtgaccactactggtcaggagggatgacagccatctaagttccacaatcttaggctactttgcattatcctggggcaaacaagccatttttgagctgcagcaggctttgaaatacattgaccaattttgcctgtgttcgttaaaccttttacctttttacatgctaatgctcacagtaatttagaaatgttctccttactataatatactcaaggtggcttgctatggtaaaataatgccagtggatgaaaataacattaatgtttaacattcttgcataaaatttaagaataataaaattgacaacaatcagaaaactggaggaacgaaagaccaaattgaaagaacttgaaaaagattaaaaatgcctgtgctttgaccctttccatttttctttcactcacagagggtgggacaggaggccgagtgaaggaaagggtccagcctgtctatctggaatctaagttgggactttaatgcagttccacaaaattggtattaattcgctaaatgtttctgaaaatgtattttcatctaaatggctatcagctaagccttgagtcaaatgggaatgaaacagattaagtcaatgtgatctctttatccaagttgccttagagctgaagtcacaatttgctgtaaggaagcttattcattgtagcatacgcatactttcaaagtatctagactttacttagtaacccaatcaggacattcaggcaaaagaaaaggaacagagaagatggagccaggttgaagaggtctgggagttcaaacaaatttttttcattttcattaaaactcaattgggcatcaaaagtgttactaatattagcttttaattagtggaaattggctggattcagtaatatccctttgtatgggtaggaatgggcttacatttctggaatttgcaaaggaaaaaataactgaaagccttcctttcacagttactgccatcaatattgctaccaattaagcacatcctaccatcatctgctttgatcacataaatgaactgtgtaccaatctgttgttgaaagactggagtcatcttcccaccaactgtgaaaaaacacatggaaaacacctggactttgtgaacggatgcggaatacagaacttctgttgactcttgggtgttttgaagacttgaaaaaaaaaactgttgcttaccaacatgtcacaatgagtccgtgtgtgggtgggtggatgggtgggtgggtgggtgggtgggtggttgagtgggtggggtagtttgctgttaaataaaatgctttgttttgaaaacatcatgtgctgtatatgatattttccttaaattttatttaatgtgcatgagttttgtctatgcattaggtttgggtgttatacccgtgtaggccagcagagggtgtcggatcccaaggaaaccaagttacagacgccatcttgtgtgtagccggaatgtaattcagatcccctggaagagcagttagtgctcttaaatcagttcaccttatgctaatacaaggagccaacaaaaccacaaaagcctcatctacaatgtgattggcaagaagagaaagatagacaggtactgcaagcgagtgtgagtgaggcaggtacaagaatctattatggtatcttaaccactgccacattccccttttcctttgcatggagccagaactaggctagcctccaagtccctaagtagccggaatgactctgagctcctgatcctcctgtgttagaattacaggcttgtaccactaagcctgcttttcagatgatagtttctaactcagtggcccttttatcataccagatacctcagttttaattccctatgtaatgaaattggttatgttgccctggccatctggctagcctgaagtccatgtagattaggctggccctaaatccatagagcactgtctgctactgactcaggagtgctcggattaaaggcctacaccaccaggcaggcctagccagttccttgggtaatttgaggtctcataacttagagcctaagttgttcaggagaaagattatgagaacacaaatctaataagatcacgagaagcaaaatattgaggctcaaaagtgggagtactggtaagatgaaatgaaaagaaagaacatggctgtcaagaagtccttgaatagagaaaggggcctctgatagttctaaaattcaaagtgacaaaattgcgtctaggagaaaagataaattctctcaggagagagtttgtactgttagacatggctctgcctagccattgctaaccagtagaagtgctccaacaaaaccgggccttcgtttccatccaatgaatgggccagaaaagcaacaacattttacctgaaatcagttcaccttatgctaatacaaggagccaacaaaaccacaaaagcctcatctacaatgtgattggcaagaagagaaagatagacaggtactgcaagcgagtgtgagtgaggcaggtacaagaatctattatggtaaatcttaacatctttggaaaatagcattggcccaactccaagaagcccatgaaaccttaccatttattactggcaactaaaggattgggacacagggcactcaaacgtatccactgatgagtatttaatagttccaaactatgtctggggtgaactatgaaacactaaacaaaataaaactagcaaatatgacagagacattttgtaaggaataaggggtgctggccagggcgggagggaaattgaaagtggaagagtaagcagaatgcattctatatacctatgaaaaatttctaataaaaaaccctatttaaagccgggcgtggtggcgcacgcctttaatcccagcactccagaggcagaggcaggcggatttctgagttcgaggccagcctggtctacagagtgagttccaggacagccagggctacacagagaaaccctgtctcgaaaaaacaaaaacaaaacaaaagacctgtctgagctggagagatgatggctcaggttaagagcactggatgctcttccagaggtcctgagttcaaatcccagcaaccatatggtggctcacaaccacctgtaatgggatctgatgccctcttctggtgcgtctgaagtcagcaacagtgtacttatgtaaaacaaaatgttttaaaaaatagaaaggaagaaagagagagagagagagagagagatgctctcataaacaacgtggaaggccagatgcacacctgaagttgtcctctgactccattatgctctgtgcaaccctcacccacaaacgtgtacacacaccatccacattcatatacaatacgcatcacacaaaagaaggaaggaaggaacgaacgaaaaagagtcaagaggagggctgccagcatccttgccctgatggctagggtcgctgcacgggtcagcagcactggactccctcgtctgactgtcaccctggtcatttagaagccaaacactgcgattcttcaaaggcgggatctgggctaagtaaggatgtggctcagtggtagagggacagccagggcctcgaactcagaaatccgtctgcctctgcctccggagtgctggggattaaaggcgtgcgccaccacgcccggctttaaataggattttttattataaatttttcataggtattgaagaggcacacatgagccccttcatggtttgctagaataaatgctcttggtgatataacttggtttcctcagcctgggttcctcaactagaaacaggcagttaaggtccaaggcatgagttgtgagctgcccgggtcttccaggcaacctgcaagtgacaggttcttgctatgcatgggcatccttattccccctgggtgaggagctttggaaactcaggggcagggagactccttctgaggcttctggaaagagagaatagatgtgaggatcaggtagaagttcccagactgtccctgccatccaagagggaggcaggagctgggctgggtatgggtcacaaagccagcagctgctagcactgagggtccttgcctttctgtcccatggcccctctcccatctgcactgtggttgcagagcctgagccagcacttcccccgactggagaatgacagaggcagagtccactcctcccattccggggcgggaagccaccatgttgcacctgggcccagcagggcctgggaacacgaggagcccacggcacccaaagccctcccctcaacccaggtccttgcgcaaggtcaggagagggcaggcaagtggccattaaaactgccctcccggcacaatggcacagtgaggtgaagctggcacaagaataaagaagaggaagaaatagagctgtagatagaagagacagcaacgtgtaataacatggcgccttcaagggtcaggaagggctattctgcaagtaatctcaggttaattagttcctctgtgctttactcgaaccaaaatttgtctcctatcagggagagaaggtggagtggataagattaaactaagcacacacagagacaattgtttttgcttttgtttttctttcatttttgagtcagggtctcacattgcagtcctggctggcttggaagtctctggcatactgctggaaacccaagcactcaccctaaccaagcactcaccctaaccaagcatgcaccctaaccaagcactcaccctaaccaagcactcaccctaaccaagcactcaccctaaccaagcacacaccctaaccaagcacacaccctaaccaagcactcaccctaaccaagcacacactgtaaccaagcactcaccctaaccaagcactcaccctaaccaagcacacaccctaaccaagcactcaccctaaccaagcacaaactgtaaccaagcactcaccctaaccaagcactcaccctaaccaagcacacaccctaaccaagcacacaccgtaaccaagcactcaccctaaccaaacattcaccctaaccaagcactcaccctaaccaagcacaaaccctaaccaagcacacaccctaaccaagtacacaccctaaccaagtactcaccctaaccaagcacacaccctaaccaagcactcaccctaaccaagcactcaccctaaccaagcactcaccctaaccaagcacacaccctaaccaagcactcaccctaaccaagcacacaccctaaccaagtactcaccctaaccaagcacacaccctaaccaagcgctcaccctagccaagtactcaccctaaccaagtactcaccctaaccaagcactcaccctaaccaagcacacaccctaaccaagtactcaccctaaccaagcactcaccctaaccaagcatgcaccctaaccaagcactcaccctaaccaagcactcaccctaaccaagcactcaccctaaccaagcactcaccctaactaagcatgcaccctaaccaagcactcaccctaaccaagcatgcaccctaaccaagcacacactgtaaccaagcacacaccctaaccaagcactcaccctaaccaagcactcaccctaaccaagcactcaccctaaccgagcatgcaccctaaccaagcactcactctaaccaaacactcaccctaaccaagcatgcaccctaaccaagcactcactctaaccaaacactcaccctaaccaagcactcaccctaagctcagttccaatagaaagaataactaaaagaattctgtagacaagggagggctttctaggtttaaaattaatttactggtccctaaaaaacaaacaaacaaaggggctggagaaatggctcattggttaagaatgctggctgctcttccggaccggaccgtggttgtggttcaattcccagcacccacatggcagctcacaactgtctgtaagtccagttccagggtatctgacaccctcatacagacttacattcaggcaaaacaccaatgcactaaataaatacatacatacacaccgaacaacaaaagactacaggtctgaaaaaagccagtaggcattgcaagcctggaggtggtggaccatggatcagaattcaaggctgggctgggctacatgagagcctttaaaagtaagtaaataaacaaggccttattctctattcccactagggaaatgaagcaaactataattggatatccctcgcatctacctacttggaatagctatctagaacctaggaaccagctggtgttggaggcaagggcctgtaaccgcggcacttgggagatttagagcaagaagatgaagaattgggtctatcctgggcaatgtcatgagactctgtctcaaaaaaaaaaagaaagaaagaggagagagagagagagagagagagagagagagagagagaggaagaagaagaggaggaggaggaggaggaggggggaggggaggaggggaggggagaggagaggaggggagaggagaagaaaaagaaaggaaggaaggaaagaaagaaggacaggagagctggaaagatggctcagtggttaccaagaacatttgctactcttctggagcccctgaatttgttttttgtttttttaaaggtttatttattttatttatattagtacactgttgctgtcttcagatataccagaagagggcaccagatcccattacagacggttgtaagccaccatgtggttgctgggaattgaactcaggacctttagaagtacagtcagtgctcttaactactgagccgtctctccagctcctgaatttgttttttgtttgtttgcttgtttgtacgttttgagacagggtcttgtagcccaggctggtctcaaattctctttgtagataggatgaccttgaatttctgacacttctgccttgacctcagtgctgtgactacaagcacacccctcacctggtttatgcaggttccggatggaacacagggcttcaggaatggcagagaagcaagttacctgactcttgctcagccattttgaggctataggaggagggggacaccaggcagtgagtccccatgtcaaaaaataagtcgagccaggcagagagggacgtgcttttaatcccagcacttggcaagcagaggcaggtcgatcactgtgagtttgagaccagcctgggctatactatatagtgagccagccagggctaccctggaaaactctatctcaagaacaaatcaatactgtactctcctcgaccttggccagagaagtttcttctgcaaggaggagcagctaatgcagactcagagctggcctgagactgagcaacaattgcatgcttagctccaaacaaggtgtctatagcaacccacacactgcccaaggcccatggaacatcgtggaagcagggctggaaagaacatgagagctaaagatggggaggcaagctgtgaaaatgctggctgccgccctcacaagcgtactgcggctgtggctacctgcatacgattccgacaagattagccaacattccagcaagcactgctaactggactcacagggttgttattattattatattattattattattttaaaaggagacctcattaaggttataggaagacagcttcgggatgtgtagggagtgggggagaagtacgagtgaatgcatgtatgaaattgccaaggaataaataaatattaaatatagggaaaacccaacacttggaaggtggaggcaggaagggcaaggtcagcgttggctacggagcaaactcaaagccagctgtactgcatgagactgcgtctcaaaagaacaaaggtggaagaagagctcagcagttagcagcacatgttgctcttgctgagaggacctgagtttgctagcaagcacctaagtcaggtagctcacaagcctctgtcactccatctccagggggccaatgcctcagacacacatatttaaaaacaattgtgagcagggtgtggtgccgcatgcgcatgcctttaatcccagcactcaggaggcagaggcaggcggatttctgagttcaagtccagcctgatctacagagtgagttccaggacagccaggactacacagagaaaccctgtcttgaaaaaccaaaaaaacaaaacaaaacaaaaaaacaattgtgtgtgtgtgtgtgtgtgtgtgtgtgtgtgtgtgtatgtgtgtgtgtgtgaaacaaaacgaaacaaaacaaaacaaaacaaccctactttcatatttttaccactggtagtaaaatccaacactaaaaggaattcctggcataagaaatcttgaggatgaaaagtcaatttaagggtatgtttgaacatagcactctgataaagacaccatccacccatttgtctaaagtgagttagtcttcccaatcaaatcctcacttatgccaatgcctgccttaaatgttttctatgtgtagtctcctcaattaccatcaacattcaaaccatcactttcccctataattccatttaccttggactttcacttccagccttattctaatttcttgggctttcatgtttattcgtcaactttcattttcattatacaaggacctgataagtttttattgataaaagttttattatttgctatgaattgaatgcggctatgccctcatgtgtgtgtgtgtttaaatagtaagctcagatgtttacttaaaaacaaaacaaaacaaaacaaaacaaaaacatgtgttttctagccaagttggtcaggaactgactgtgtagcccaagctagtcttgaactagctgcaatccctttctgcctctgcctttaaagtgctaacaagtgtgagccacctgcccagctataactactattttttaatgtgagcactttctgttctcacagaggacctggtttgatttccaacacccacattgtggctcataaccatctataactccagttccagggatcctagcaaaccctcttctgacattggtgcccaacaggcatacacatgattcacaaacatgcaaacaagcagaacactcatacacgtaaaatctaaaataataataaagtagacctatagagtatatataattccaaatggatttcagtagaagaccctacttacattgcacagaaaaagctgtctggctgcttcaggcatgccaatatcagcacatgtaaacaagcttccaactttgtttttgagtaatcaactcattattcaccagatctgaggctatttctattcaacagcacaagaaaagaagggagaagcaggaggatctctgtgagtttgaggccagcctggtctacagagctagttccaagacaccagggctgttacatagagaaatgctgtctcaaaaatgaacacacacacacacacacacacacacacacacacacacacaagcgcaagaaagaaaccattcgaatttgactgcatatgtacataaaacctttaaataaaagacgtaatttcaaatcaaatgaggtcttaagaatggagcctaaacctgtctgtctctttaccagacgcagggcagccagaaggcagccattcacaatccaggaagacaggaagggataacaccagaacccaacctccattttagagaggtctagcctcttgagctatgacacactatttgttctctaactacccaaagttgtattttactatgctaattagctgattaagacattaggtaaaggtgttctacaaagaaactgtaaataaaagacatactctgtgccttagcctatctcatgattccttttctggatgtcttcataaccaccttaacctctacgaagatacagagacacaggtagcactacagtgctgtatttgtttaagcccccaacaaacttggtggcttaaagcaacacagatctataaccttataattttagaagtcagaagttcagtgtgagacacctagttgaaattgaaattattatttgaaattaaattgaaattattccttctgtaagttttagagaattcatttccctgccctttttagcttcaaatttcttagctagtaattgccttcctctatgtctatagccggatgtagagtctttgtcaatcttttatccctgccatttcaatgaaacaacaccttaccttctaggggaatctttttatctcaaggtcgattgattagaaacctcagtttcttcctccaatgtaatatagtatattagtatattctggggagtcagtgtttgtctgcctactaacacaggtaagaatttgcataggtattacaaaatcagtactttgcaaatctttcttctcttccgaattgaaaactgaacattaatccaaacatggcggcagaagcctttaaaatcggcactgtcccactgaaggcagtggcaggcagagctttgcgagtttgaggttatttactgagaccttgtctcagaaataaggcattaaaaaaaaaacaaaaaacaaaattcaccccaaatccgcatcaaaaccaaagctgattgttaatttccctcctttctaaactggattcattccttagtgccattgtttgctcgtctgaacacactgaataaacactaccgggagggattttccgtgcctatagtaaataagaatatgatttttcagatacgaaccactgagaattgttttgccttgcccgccacccccaccccgaaaatactccttgtcccagatagtagaaacttaatgggttttcaaagcactcagattattttcgaatttcaacgataccagagatcgggtcattatgtacctcggaaataaacggaacgcagtaccaaaattttaggtctcaacttccaaggcttctcaaagaaagttatcgcagacttagttactcgttcttggttacttcacacgctaccagtaatttttccacttttctgaatctgtgccccccccccacattctttcatcaactttaatccaaacgcgtacaatcagaaaaccccactaaagcggaggtagaatcccattggtttttagcataatcacatggcgggaaaattgttaccaaaaaaaaaaaaaaagagcaaaaatcttacctgaaaaagacacgtgcggtgaggtagtattgctgaatttggcttgagcaatattaaaatattaagactattccaaagagtttttcggacacgaggctttccctgatgtgagtgtgtggattctagaccctgctacaagtcacgcccttaactttcttttccgctctagactgcagtttattacccacgccaggcttattgaacgctttgcatatctacctgtaacattttagccaaccatctctacgctatcccagacattttcatcacctctgctctgcccagcagacattttagtcgacctctaggggttggttataaggcagggattttagcgatctccccaggtccctggcggcggcaggcattttagtgatagcccaggtccccggtggcaggcattttagcgatagcccaggtccccggtggcaggcattttagcgatcttccagatccccagtggcagacattttagtgatagcccaggtccccggtggcaggcattttagtgatagcccaggtccccggtggcaggcattttagcgatcttccagatccccagtggcagacattttagtgatagcccaggtccccggtggcaggcattttagtgatagcccaggtccccggtggcaggcattttagcgatcttccagatccccagtggcagacattttagtgatagcccagatccccggtggcaggcattttagtgacctcccagatccctggtggcaggcattttagtgatagcccaagtcccccgtggcagacattttagtgacctcccagtaagcggtggcaggcattttagcgacctcccagatccccggtggcaggcattttagtgatagcccagatcctcgacggcaggcattttagtgacctcccagatccccggtggcaggcattttagtgacctaccaggtccccggtggcaggcattttagtgatagcccaagtcccccgtggcagacattttagtgacctcccagtaagcggtggcaggcattttagcgacctcccagatccccggtggcaggcattttagtgatagcccagatcctcgacggcaggcattttagtgacctcccagatccccggtggcaggcattttagtgacctaccaggtccccggtggcaggcattttagtgacctcccaggtccccggtggcaggcattttagtgatagcccagatacccggtggcaggcattttagtgatagcccaagtaccccgtggcagacattttagtgacctcccagtacccggtggcaggcattttagtgatagcccaggtccccggtggtaggcattttagtaaagtctcccagtcccaggcatccatttgagccattagtccgggaacgtggcatgtatgttagctatctttccaggtccctgaccggtagtctaaccacctgtaagggacagacattttaaattttggctccaggacccagcagacattttagttattcctccgttatgcggcaggcattttaactatcggttcgggactacgcaggcattttaccttcatctccgcatagctggcaagcattttaggaatctttctgctgcttggcaatcactttaaccatctcttccgctgtcccgcaagcacgtagccatcgctccactgtcctgaaagcactttgccactgtcccactgtcccgcaagcacttagccacctctcccctgtcccgcaagcacttagccatcgccccactgtcctgcaagcacttagccatcgccccactatcccgcaagaatttcagccacctctccaccaccccaacaaggacttcgggcacctctccaccgtcccgcaggcactttaggcatctgccctctccttagcccgcatctcacccaccgctccgctctggccacctgtctagctggctatcacgctcttcttccatcacgcgcttgccgcagccgcctcccgggagtggatgcaggactcaagatgcgtggatatctcggaaagtgagaacagagcaagggcgccgagcgcaagtgtgtagcgcttgcaggtacttttgggaccgagtggagcacgacgtagcgcctcaccggatcttgcgagattgcgcctgacacaagcgctgcactgagggtttgagggagtgtggggcgggacctaaggctcttgaggcgcgggatcctgctgagagggtgtggttagcacacttgaccacctgcgcagagaagagggggcagagcttaggggaacagagcatggaccttgtgggagtcacagaaaagaatggctgcaacctgagcccatttgcctttgagagctgggaaagctaggccagcaggtagcagcttgcctggtcgaatggcccttggtgagtgttggaatgctggaaacccagagaccaaagctgccaggctcagctccaacacagtctcatttgtttggtttgtggcagactgcctgcaccccaaccctttcctccccagtcttgcctcctcctgccccctctcttaaactcttacggtctcaaagactgggtttgagggaaacctactgtaatggattgatatacttctccttcaattgacaagagacttaatgtcctagagaaaaattttccttaaactgtacatatccaaatttcaaaaaatgtataacagtcagtatcaatgcaaactgagcaatctgcctaggtacctataaacacacaagatacctataaacacacaagatacctataaacacacaagatacctataaacacacctagatacctataagcacacaagaagcttatagagcaccaattagactggaacagaaaagaaaatcctcctgccacataataacccaattttcttttcaaagaattttttaaaaatatttttattttatgtgtgtgggtgtgtgcagagcccatagaggccggatgagagcatcagatctccctgcagctggaggtacaggcgtctgtgagctggtactcgagtgtttgggaatcgaacctgggtcctctgcaaatgcagccactgctcttagccactgtaccatcattttaaccccaatgtcaattttcagtccccaaagctttgctggtatgtgatacaaattttataaaagtagaaaatgaggagaacttctttgcaaagaaataggatgtagcccaagggaggaaacaaaaaaccctctgagtgaaaaaggcagattcttcaagtaaaatgaatacaaaaatccccaagaatgtgatattttggcaaaagccctctataccatccaggtctgaaatattaaaagaattagagcctttcaccaggtggtggcggcgcacgcctttaatcccagcactcaggaggcagaggcaggcagatttctgagttcgaggccggcctggtctacaaagcgagttccaggacagccagggctatatagagaaaccctgtctcgaaaaacaaaaacaaaaacaaaccaaaaaaaccaacaaaacaaaacaaacaaacaaaaaagaattctagcatctttcacatacaaaagaaagtaccgaggaaaagctggaatggagctctttcatgttcttccttgagttctttgaactgaaacaaatgatggaaaatggcttctccccagaagccatcaattctcagtagaaattcaagaagcccattcatgaaaattcatggaaggccacaggaagctgcacccaagctaatcacctacctttgccaagtatactgaaatagctccatgttcttagtatgtctactgttccgtgtgcttggcacaggtctgtaattgcagcacttgggtgtatgtggtagagagagacgtttcaggtgttcagggttatcctctttggcgatatagtgagtttgaggccaggctaggatgcatgagaccctttaattcctgcacttgggaggcagaggcaggaggatctctgactttgagaccagtctgatgtacagaacaagttctaggacagtcagggctacatagagacaacaatctgtctcgaaaacaaccataaaacaattgtgtgtgtaaaattattaaattattgagctttctaggaatttaaagctttaacagtgagatactttgcttttaaatatcaatgcccaattcattcatatttcttcaaatgaacgaaaatgaccagtatgcatatgttgttactggaatgcattctttttttacctttagaagatagaaagtaatactccaaaatatttaataaaatattttaaagatggatgctactagtgattagtattataagtagttgttaactgataacattgattacctaacaaaagttgactgtgagaagatagcatttctaggatgtacaggagaaaacatactgatttctagaaactatcaccaaattttaaaaataatatttttattaattctttgagaatttggcatgtgtactatatcacccccattcctttctctaaccccttgcagatccaccacctgccaccctctctcaacttaatctcctcattaaaaaaaaattacccacagtgtccaatttgtgctgcacgtgaatgcctggatgtgaaccatccactggggtggtgtgcctaccaaggagtcaaaaaaccgtgactgtccctctcccaaaagctctcaactctaaatagtgcttccttatgcttggaatggcgattaacacaagcttattcaggcagctacagttcacaagtacagcagttaatgtcctgtcctgaaggttttgttttgctctggtccggctttgcctatacatcacaaagtctgtttcttcttctgccatggtcactggtccttggggagaggggactgcttttgaaaatgaaggtcatgaatcgacttcaggaggcccattgaacttgtgaaacgttgtgctcaatatttgccctgtatatgctttgcagagaaagttttcttgatgctgagaatcattggtgtcagagataaatccacagtctgtaaactgttgactgtagctctctccttacttagcatatgggggatgtggttattaaatgttttattgtatgcttttcctattttgttttttggagtaatttttggcaggaaaaaaagtaataaaatgaagagtttgaagttgaaaaatataaaacagcaaccaaagggaaatactcactttagaaatgagtacattcaaatatacctgagaaatcattacattaaaactatataaagtaaagccaagtggtgatgatgcacacctttaatcccagcacttgagaggcaaaggcagaagcagagaggcagagagaggcagatgcatctctgagaattcaaggccagcctggtctacaatgcaagttccaggacagccagggctgttgcattcggaaaccctgtctcaaaacaaaacaaaacaaaacgactaaccagtcaacaatagataacaacatcatgccctgtataaaatacctacaagttaatgttaaaacacaagtcaatagagtaggggaaaggcagtgtgcatgtggggagtactcatatgtccaacaaaagtaaaaatttgccagaatcaggtgtttgtttgagggaggggaatctcaggaagcttgggatatcttgttcaactcatgctcctgcctccaccattcaagtgctagcagtataagccttcttttttatttatttatttatttatttatttatttatttttattagatattttctttatatacatttcaaatgctatcccgaaagttccctataccctccctccgccctccacccctacccacccactcctgcttcttggccctggcattcccctctactggggcatataaagtttagtataagccttcaataacaaacatgttcggccccagaatccccatattcaaagctctgtaatgtagcaaaaagtccacaagatggcgatagagacaaggtgctaggttaagtagaagaggaagttcaaggccctcttttccgcagggaaagtttgtgaaatttttcctggtccttgctctagctctgtctggtggaatgtaacaacgttggaggaagcagtttcttttttcgggaaggagaaagatctagggatatcacgctcattactttctacacttatctgaacgctatctggagtcagaaatcaaatagctgagcgcatttggatagcagtgatcaaaactctggaaagagaaagtatactgcaggggaacagcgggctgctaagtaggtgtaggtagtccctgctgaataaactaaagtagccaacgacttgaaaagaaatagagagatctgcagagaatttaagaggtttaaaaggcactgtgtacacatgtgctgattttggaacttcctacaaagctgcacgaatcaaaagtacatggaggggttggagagatggctcagcagttcaaagcactgactgctcttctgaaggtcctgagttcaaatcccaacaacaacatggtgactcacaaccacttgtaatgagatcggatgccctcttctggtgtgatctgaagacagctacagtgtacttagatataataaataaataaatctttaaaaacagaagtacatggaggtggatttgaaggtcagcagctcatattgctgatggagtttacttggagtagagtggaaaatgtggacataactgtgagtctgtgttctgattgttgcctcccagaagatcaactcagggcattaatgattgatccacttacatgaacttcctcaggcagacatttaaaaattaattatagtgttgttatctaggttatgacaacatagtcaaagccagcaaaagggatgctttgaggtgacgataggggaagatagctttgaaattttgtttctacgcattctgggggaactacaaagtcatctatgtgcccattactcaagtcatattcaggagaaagggggggtggaaaaggttgaagtccttaatctgattgtaaccagcttctaggttcacaaaggcagtaaggtgaaggacaggacaacattgaaaactgcctgcttgccgggcagtggtggactttaatcccagcacttgggaggcagagacaagtggatttctgagttcgaggccagcctggtctacagagtgagttccaggacagtcagggctatacagagaagtctcatctcaaaaaaaaaaaacaaaacaaaaaaaaacaaaacaaaaacaaacaaacaaacaaacaaacagaaaactgccttctgggtattaaaagtgtgtttcaacgaacatagagcccatctggagagatagctttgtctcccttctttttgaagtttcttttttatgtgttttggtaattaccagcatgtgtaccacctgcatggctagtaatgtggaggccagatgcttgagtcagatcccctggggctggagttacagacagctgtgagctgccatgtgggtgctggaaacagaacctaagtccttcataagatcagccagtgctcttagccactgagccatctcttcagcccctttgtatcacatctttaaggaaattctgtcaagtctagaaaacagacccccatggccacacacaacaaagaatgcggattttataaaaatttacacctcaaattccaatatgcaaacacacttcaagtaaatgagcaatgggcgtgtgagaaatctttggtatgggacaagcccacacagggtgtccttgcaaggacattctataggtctcagaactgagccttcgttatgctgctggaagccatctttatctagctccgttgagtgagagtttgcttgggaacagacctggtgataattatgtaacaggcagaaactggctgaaggtgctgtagcaagtgacacaaataaacttgttcattcttggaggaggggagcagtggggtcaaaactctgagaaagaaaggacaatctatttcccaagtggcaagattataaaattcaacctgtcacagtgacaaccaaaaatgacctggtaaacaaataggaatttaagatttgtacataagaaaaatagagccttcctgctcataatgtagatgtgcagcttggccttcatgtggatcctgaactactggaacactggaacgggggctatcacaaaagctgttgcctgtccatgggatttgttctcctagctgagttgcctggtgggcctcagtaggagaggatgcacatatcctcacagaaacttgatgtgtcagggtgggaggatacccaggggccctcaccagctcagagaagaatgggagggagaaggaagaaggatcatgggagggggggacctggagttgggggcagtgagcaggatgtaaagtgaataagcaaaaaaaaaaaaaaaaaattgtctcctggagccaggcgtggtggcgcacgcctttaatcccagcacttgggaggcagaggcaggcagatttctgagttcgaggccagcctggtctacagagtgagttccaggacagccagggctaaacagagaaaccctgtctcgaaaaacaaaaaaataaaacaaaacaaaattgtctcctggaaatccagaagaccagacagaagatagtcaaccaaagaaaagacttgagtgatactgtaatctgactgtataacacagaacaatacaaaggcataacagtaggaaagcaagcttctcattgtaggctcggtcttcagggaagactgtatcctagggcaaaaaccaagtgtttcctcgggatgtgctaaacctggtgctggcccagtatcctctgcaatgatagaattctacctagactgctccatttttcagccagcctctattcagctagactccagaaaaacaagttcagtgtttggtgttttgctatttggtcactaggtggcagtataagcccaggtttgtgctacagacttaaagccataaaaaggagcttggttggtcatatttttacaaatacaaatatttgtagtaccttggatgactttagatggatgcagtcctctgcagtgatctatactatagtttatatgtaactccaattaaaggcatttcaaatcagactggattagcatggatacatttttgggctgttagctccgttctattttgtttacatatgtttcttttttcactcttagggaaactcattccaacagtcccacagcttcttgtcagaggtcctcgataaatattaaaaggttgaattgaaacacagcaagttgtaacacatcacacacatgtatacatatatacatgtatacagcaaccatatgctagctcatagcacatggtagcccgcaaccctctataatggcatctgattctctctttcattgtccatgaagacagagaacacatatagattgagtaaataaacaagtaaataaatgatctttatacacatacctctagggaaaacaatatgaatatagctctcataaattctcaaaaacaaatttaaaaataaaaaaagaacttaaccacatagaattatactagaaataaaagcaaaaagatatagggaaaattcacaaatgcatcgaaatacaatttgcctaaacatccaaagaatgaaagaagggaaattataaaatatgaagatggataaaagcatctcaaagtagcagcagaccagaagttgtagcatggagtaatagttgtaataggaaatttatacttgtaaatactgacataaaagaaacattaaaaagacagttaaaaaaaatgggtgctgtaaatctgaccaagaacccacaacttggacactcaaagacccttggggtgatagtggtggaccatccattattattttgcttatcagacacatcgtctaactcctctctaaatacagacctccaacgggagaggctggctcagtggttgagagcactggctgcttgctcttccagagcacctgaatgcaattcctagcaaccacatggtggctcaaagcacatggtggcccacaaccatctacaatgggatctaatttcctctttcattgtccatgaagacagagaacacatatacattaagtaaataaagaaacgaacaaataaatgatcttttaaatgaatacttctagacccatggattagggtagctctcagacctccccagagacacttctttgtgtagtgaccagggctttgatgtggtcaaaatggagagaatagtatctgtagagtgtgaagggtgctcagttctaaatggagcatctatatcacacagttacatgcaaacctcagagaaaatcacttaagacaggggccatctgggctgggggttaagcagcagtgacaggaccggtgctcaggagctcacagcagctgtgattccaatactaggggaggtactcgatctaccgctgaggagccattgggagttaatggtgtggccctctgatagatccatcaacctgcaatggatgaccccatctccatgcatatatggttggttggcacaaacgggacccagtgtgttattaaaaaacaaaaacaccattaaaaaaaccaccacaccaggccaaagccatcatttttagcatcacaaaaaaaattgaataaaatgaacaatttcttcgactctatcagggaaataacattccccaaattacaaagtctcttagagagagcagcgacttgctgatgagtgagaaaacagctcctgtccacagacagtgtgaacacaggaaaacaaactgacgctttcttggaaggtttgtttgaataaatttaataataagataatccaggctatatccagcgagcaatacacttttgtgacttttcttcataggagccctagagcatgttttttagtgaaaatgatctccatagggattggaacagaaagagaaaaggaagcattctgaaacacccccatagcagtctgctctcctagcttcagcctcagacaaacgtgactcattagaaattcaagtaactgagtcccttaatccccaggctgacatgcaactcctgagctcgaacattgccccaccttagctttcataagactcaaaccgacctgaagggagggaaaaaaaagcccaattctagcccaccacgcttctgcttaaccgacgggaaggaaaactgtacaagacccaagaagaatcgctgtgatgaccacagttgagtggcatagatacagctaatgaacaccctgccaccatcaaggcctcctgtaatatcagagaaatacaataacgtgtcatacaactcagaactaattcaagaagtctctagagcaaccaaagcaacaaattaggaaaaataaagacacttggaacattctccaacctgggatccctctggctgtatcaaacagtggacacatggtatagccctcattttcaaccacatcaaacactgtatgtaaagcttactaaaacaaaaaaatctcagctagaaaatacagatcagaaccaaattcaggcgtggtagacatctgcaaggattagatggtacatctaattatgattaacatggtaaaagtgctaaaacaaaacaaaacggtagactggttttgacccccggacaagggacagaagtgcttattttacatatcaatgcagacctggcttccaggttctactagcagcgttcagtccctgcctgatataccttgttcccaaccttgaactttccagttcaggggcttagctgcccttccacaagacgttctttccaatgttatctagacattttgcgccccacccttctcctctctgcacgagcgcaccccttcttcccttttctcctctcccctctccccatggcaactcctcaatccttgaagccagtgaactccccgagagcagttccccaataagcctacctttaatgcaatcggacttgaatagtctcgtttcacgggcagagaagtcattgatcggagacaacatgcatgaataggagaccaacaccatcaacacaaccgatgctcaaaatcaatagcattaagaagtgagcattcataaagatttggaagctaacacttcagagcacactccagaagaacaaatggggtgtgaggggaagggatttagttagggattttgcttgtcattggcggtgcatctctgcaatcccccaaatctggaaggctgaggaggatcagaagctcaaaggctgcctggaatgcgtggggagaatctccctctaccaataaagagacaaacaatgccagacaagcagaatgtatcaggagacaactggaaatgggataaagatacaagataatacctaaaacctaatggaatgaatgaagctaaagccgcacaaaggtgtgtgtattggggggtggggggagttacagatgcgcattcctaaggaaggaatctctgagtcaccaccacctgcaggaaaaccttggcagaaaacagaaatgacaaaggctcgagcgtaaatacaaaattttaaaatgctgtttttcttgaaaaaaaattttttttaagaagctgatgaaactaagctacaccaataacaaactcaaatcacgtttgcaaaaggagaccttacaatcagtcaatgcttaaaatctctcaagagccgaagcagaagggatgctatctaactcaattcatgatgccagagtgatcctgatatcaaagccagaaagagacacaaaagaaagttaaaaatttatagcccacatccctgatgatcatcatcattacaatatccataacccgagtttgatggaattaaaatatccaggtgggatttactcatggaatgcaagaatgattcaacatacaaaaatcaatgaacacgatatcaccacaatacaatgacgatcatcttgatagcattaaaacaaaaacaaacaaacaaacaaacaaacaaacaaaaaaacccacggggctggggagatggctcagcggttaagagcaccaactgctcttctgaaggtcgtgagttcaaatcccagcaaccacatggtggctcacaaccatccataatgagatctgatgccttcttctggtgcatctgaagacagctacagtgtacttacatataacaaataaataaattaaaaaaaaaacacttggaaaaactcagtgtactcatgattaaaaactctcggtaaaccaggaataggaggaaattgtctgagtacataagggccacattgaaaaagcccacagctaacatggtcaatggtgaaaaattgagtgctttccctttaataagatgaaggaaccaagaatgtttgctctcttagattccaatcctaatagaattgatggtcctgtgcagaacagttggggaagaaaaggaatccagggctgggactgtaccacagtctgtagaatgcttttctctagaatgcataaagccctatgtgcaatcccaatagtggtacaagcctatgaccctgatactcaggacgtagaagctagaggatcacaattcaacgttaccctgggctaaagaccctgttttactttattactttttttttttttaatatctgaattgtaactgactggagtactctgctcacaaatgccatgattatttatgtgggggacttacgaaagtctacacacacatacacacacacacacacacacatacacacacaccatacaactcaggtaattcagctgtaaagttataggatacaaaatgagtatataaaagtgaattgagggccactgagatggctgagcaattacaaacacttgcccccaagtttgaagacctgagtttttgtttgatacagccctggctggcttggaaattactatgtagaccaggctggctaccaatttatttaagatctgtctgcctctgcctttgagtcctgggattaaaggtgcaagccactacagcaaacttggtgttatagtttaaatatatggtttactcctagcaacttgtatgttgtcttggtgctgaaatgtggtggcatctttaagagggtttaattaatttctcaagagcctagctgagttcttggattttaagaagaggttgctataaaatgatcctagcatctacctgatagctcttgtgcatatattatactggacaaaatagatgtttccctaccacaactctcctatgagttaacactgcttccaaccagaaactgagaaaatcctggccagcacagtcttgaatgtctctgtttccagaattgtgacctaaatttatctttactattcatgacttaatctaggttgaggaatgttgctataacaaaaaataatctgagataattgctctgactagaacatttaatattgttaaaatactacttctgttcaaagtgatctgtagagtcaatcaatatctatcgcactcccaatgggtttttgtttgttttctttttgtattttggaagtagcaaaaataactataaaatacatatagatgcgtgaagacccatgaacagccaaaataatcctgaaaaagaacagctcttgtccaatggaccttgggggaaaccaaacgtcacattttacacagagcaggataaggtattggttttcattttgcctctccagaacacaaaacctagatttttttgtttgtttgttcatctgttttaatagggcctcatctttagcctgggcttaccttgaatttggagtctgcctccctcagttgctatagttctgggattataggcataaggtgcaatttccagcaaaaatcctttaagggctgcttgaaactcactatgtagctcagcctggcctcaaactcataaccatcctctcaagtgctaggattacatgaatgagccacagtagcagctaaaaccctttacattttattagggtatattctatacaatatgagtgccattataacatcacatacacgtaagattttgttcctattcactcccattactctctttttttctccctctcacttttactgatccccttactctgctcacacacttctgatttctggtttcttctatagcatggatgaagggttatttacaggaacatggcagattcttaccgaagaaagtatccccccctcccaactccctcagcaaacaataactactaataccccttctgcagggaggaatgaggcatcttggtcccttacgtctagacactgttaactgcctcctcggggagggatgaggccttgtgagcctcttgtagcaactgttaacttcctacacatcctaaggaatgtgggggtccccttgtatacacaggccttgggtagggtaatcataggtgctgtgagtttatgagtatgactgctgctgtatgttccacaataccccatcccttcttccagctttacctttctgccctctttgctgtggtgtttcttgaaccttgcaagggaggagatgcagatcccattagggctgatcttcaacaatcacacaatcacatattcttttttgtttgtttgtttgtttgtttgtttttttgagatagggtttctctgtgtagctctggctgtcctggaactcactctgtagaccaggctggcctcgaactcagaaatctgcctgcctctgcctcccgagtgctgggattaaaggcacgcccagccaatcacatattcttatgactcagagctaaaagtctgcacgaacagaaactagtcttaccaaagctgacagtagcacaaatctacaggtataaacatacatggttagaagacaatttgatagtcataaggtggccagctagggaggcaatagtggtaaagcttctccattagagcctatggtctccccagctagaggcttttgacaaggcatgaactttctcctagcaagtgagcctcaactccaatcagaaagttaattagccaaataaaaaaaatggtaccctgtgctcagcttggcctgtgagtaaatctgtgggacattttctcggttaacgatcgactgggggggggggcagtccacttaaaccatgtgggtggagccacccatggacaggtggtcctgggaggtatgaaaaagcaaagtgagcaagccatggggagcaagccaggaagctgtcctttgtggttcctgccctaatttctactgtgatgtggaagtacaagccagataaatcctttcctacccaatgtatttttggttagaatgttttatcacagtaatagaaagcaaactaaaaactaaaacatctttctaactttcatgccacagtttctttttcttcctttcttttttcttttctttcttttcttttcttttttttttttttttttttggtttttcgagacagggtttctctgtatagccctggctgtcctggaactcactctgtagaccaggctggcctcgaactcagaaatccacctgcctctgcctcccaagtgctgggattaaaggcatgcgccaccactgcccggctgcatttttttttttaaattaaaaaagttgaacctaggtgtgttgtctcgtgcctgtaatgcccatgttcaggagagagagagagggagggcagggtgattactatgacttcaacatcagcatgcgcttacatcatcagttagaggccagtctgggatacagagtgagaacctgtctcaaaacaaaaacaaaaaaacaaaaaacaaaacaaaacatcaactatcataagtgacttaaataatggatattaaacctaaatatcacacaacttcacttaagaaaattctgaggactggaaagatggctcaatgattcaaagtgctttccggaggaagcctgaacaccacagtttgagtcctaacacttttatataataagctaagtgtgggcccatgcatccctataagtccagcactgaggctagcagagactggaggattaacaaggcaaacaggcagacacggtaacagcctcttcatgcatgcactagctcacacacatgagtgcgcgtacatcacaaacacaagcacacacaataaatacatttaaaagttttcttctttctttgtaagtgtgaaaattacaaattgtagaattttgatccagataagaggatcaggagtttgaggctagcctgggctacataagaccctgtttcaaaaaccaaactaaaccaaaacacacacacacacacaaagttgacacaaattttcaccatgtattcgacgtgtcaaggctcacctgggtcatgcaagactaaataaattaattgtaactaaatgcaagactaaatgtctaaagtatttttgaaagtctggcttaatgcaatttgcttcggtgttttgtcagatgacaagttagataggtcattccatgcttgtttacgaacaagacaagtaaaatttctcgagtctctgtctcttggaataggtctttccactgtaggtgggagggaaatgtttccgtctcccaagtgctggaatttaaaggtgtgggtctggttgaactcgttttttgtgtccttcagtggtcaggtgccccggctggtgggtggggtgggaggaggagtatctgtctctattgttcctggactgatcctgaagtgtaacggaagtgaaaggaaggttgagtggagggctagtggacagtgactggcccacaacactacctttaagaagacaaatggaccatagtgatgtacacctataatcctagcacccaagaggcagaggcaggaggatcactgagttcaaaaccgtcctgatctacagagagagagagttcaaggacaaccagggctatacagagaaaccctgtctctgggggggaaaaaaagcaaggaaaaaaggaaggaaggaaagaaagaaagaaatgaagagaaagaaaaaagactaataggtcccagagactcccatgacagtgggaaagaagagtctgcacacttcctcctgctggaattcttgataagaaataacctccagagaaatggcaatcatttacaatttataccacaaattatactacactggaacaccatagtaggccttaggagaaaaacagacgcttaaacatccctacttggaggctttttgaaaacaaagtaaattatctttactgagcaagaaaacacttggtgtctaggtaaccctgtagcatgtgtgaaacaaaagactattgcccagacagagcctcaactttctcctttctattaaattcacagtaaaaagcaaacatgtatagacataagtaataaagtcaggtgtaggcataaatcaccgcatcttttctacaaaagtgagcttaagcgttttacctttttaggacagagtgaaaatccggaagttgtcttctgattgttacatgctgccacggtcctccctgtcactgctgccattgggctatggcctggtgtctgtactcaaactgaaaacttgcaagctagcacacgtgctggcggagtgtggacgcacgggtacacgtgcgcacgcatgaacacacacacatgcacacacgcgtgcgcacagacacacacacacacacacacacacacacacacacacacacacacacacacattttgcgcatgcgtacagatatgtgcgtgcgcacacacatacaggcacacgcacacatgcaagcgaataaaattaaaatatggtaggcgcatggtagaacatgcctttgatcccagcatttggaggcagaagcaggcagaactctgaatttaaatccaatctggtctaaaatatgagttccagttcatccaggaccacgacaaaaagaccctgtctcaaaaacacaaatcacaaaatggcaaaatgaaacaaaacaaaatgaaaaccaaataaaatagaaataagaattctaccttcagctgagtgtgtgtttgtgttatatatgaatattgtgatgaatatctgtaatcccagaactgaggactttgagacagaagaattaggagtttgaagccagcctggaaaagatggccagattatgactgtttttctaaataataagtaaagaaataaagaaaaggagaataacaaccaagcatggtgataaattcgtgacctcatcttctatgtatatgatgtaaaagtcatgaagtaataacctcttacaatattcaagtagtagctttacttggaaagaaagattttaaaagaaattttattttttagacagtcaaaaatataattaagaagtatcgtatctgtgctaagcagacaatataaaattcgggaacaaagaacatatatctttatctgtttgcttatttttatttatttatttatttacttacttacttacttacttacctacttattggagacacatttttttctatgtaacagccctcactattctggaactctccctgtagaccaggctggcctcgaactcacagagatttgcctgcctctgcctcccaagtgctgggattgaaggcctgtgccatcactgcctggcactttttctttctgtctctgtctctgtctctgtctgtatctcttccttcctttctgtctctttcttttttatctttagtatttttaaaggcatgtttttatctgctagctatttatttttgaggtagagtctcacgatacagcctcaactagcctggaactcagaaagagccatcttcctccccccaccacacctggcaggttccttttaaagacattacttctcaactcaaataatgctaaaatcaattgagctgtttatcatctgactattgttggttagctagaaacttctgaagtgttgcaatgtttagctaaagtctagaatttgctgtttttccatgtgttaagtgtcaggaaatgcgaggtaggtaagtgtttgaagatagtgtctgccattatacaaaatgctgagtgataggctgattgagtgtacaaccaaacagatccagatagtcaccaacttatttattagttgctggactggtttttaccaaactatgaggaaaagtaggagggataaaaaagagtaatagaggggtgaatatgcaattatgttatatgcattatggaaatagttaatgaaatctttactttgtacaaatagtatacactaattaaaaagatacaaatagctgatatgcaagataaataagttttacagatctaatgtatacatagcacaggcactacagttaatgatactgtgttagatcctttttaaagaaaactctagttttgctgagcgtggtggcacacgcctttaatcccagcacttgggaggcagaggcaggcagatttctgagttcgaggccagcctggtctacaaagtgagttccaggacagccagggctacacagagaaaccctgtctcgaaaaaacaaaacaaaacaaagagtactgactgctcttctagaggtcctgagtccaattcccagcacctacatggtggcttacaaccatctataattccagttcttaggggacattgacaccttcttctggcttctgtggacactgcacagatatggtacctaggtatggcagccaaaacacccaagcacataaaataaagataaataaatatttttaaaaagggggatgggggtggacagatggctcagcggttaagagcattgactgctcttccagaggacctgaattcaattcccagcaaccacacaaccatctgtaatgggatctaatgccttcttctggtgtgtctgaagacagctacagtgtactcaggaaaaaaatagtttttttttttttaagaaagaaattcagatatctgctgtattgtactctttattactgccaggacaaaatgtccagaacgataattcaaaaatagcccactgacttttcacgtgctagaaggtagaaagtgatagcagatttcatgccatgcagatgatccctgtttccacagaggtgcttctctcacaagacagaagaaatggaagagcaaaagacacaaccaggagtgtacttttagctgttcttacaaggacagggacagtaatcgagtcatggaggcattaccaaatacatccaaaaaggccttatctttcttgttgtttttgttcggttggttttggttttgaggcaaggtttttcggtgtagttctggctatcctggaattctggagtcaggctgacctcgaactcacaaagatcctcctgactctacctcctgagtggtaggacaaaagccgtgcaccatctgatcaccctactcatgatgtgtgcatgcacacacactaataataacaagcaaaaaatatctttaaaaagtctaaaaccacaactttgagacagacattaggtagacatacttattccaaaagtcagaaataggaaagaagaaagggataaattacgccaaataagccccagacatggcagggcaagagttcgttctgtgtgcgcacgtgctccaaagtgtttcattacagttgctttcagagtcctgggtgaggggattatttgtaggagaatggactccctacaagtagttacacactcagatcttctctccctttctcaccaactatagaccccccagggaggggtggggtaacatcagctcctcccaataggggaaggttttgttggtgttgtgttgtgttgtgttgtgttgtgttgtttgagacagtctatcactatgtagcctgattggcctggaattcatcaggtagaccaggctggcatctaaatcagagattcacctgcctctgtattttgactgctgggattaaaggtatgtacaccaacatattcccctaagaggggatggatcccagggtctagatgccattgctctctctcccctctctctttataaatatagttttaagatttttacttgtatttatcagtacagggggtgggttgctggagtatgccagaagagagtattggatcgcttggagctagagttacagggaattttgagacatctggggactgaatataagtcccctgaggagcagcaccccaacatggtaatacttcatcttaaggctcaagagcaaactttggctccaagttctgcctctagacacacggagcgccatttgggttcacagggctctaagcttgcctcgctaggcacgctgacacagcacttcttgtcagtcggaaccagttgctggcacctctcccaagctgtttttgcatactggtggctctatagctctggcgtcataactgagagcagtgttttcatagctcttttgggcattgctctcattgggggtctattctctgggcaaaagtcgctaagcactgtgctggtagagactttatatcagccttcctctggttctctgcttggctctcaaaactcatggaggaatcctttgaaatctaggtgaagctagtcatgactccacagctcatacgtttggaggcagcagttccttgctaaattctactttgtgtgcattaatgtctcctaagcaagtctagtagaaaatcctttataatatcaattgtagtacttcaagtttcttccgcatcacggcatcggctgagtaacagtcccccagatagatggaacaatagaagattacaaagtgagaaaaggaaggaagtagaaaaactggtgtttacttggttccagctgttttctgattcaggaagaaaggggccgggcatactctacccatttatagtaagaagatttttttgttttggtgggtttttcgagacagggtttctctgtgtatccctggctgtcctggaactcactttgtagaccaggctggcctcgaactcagaaatctgcctgcctctgcctcccgagtgctgggattaaaggcatgcgccaccatgccaccacgcccggcttgtagtaaggagatttaactgtaccatgtaaggcaagagctcctcatgtcagagttcaaaaagtaaatgtgctgaaccatcacttggtttagaacagcttaagcccccagcccccactccaccccaaaccaacccttgactgtttaattgctgataaggaataaaagccctttcctataaaccactgtttgtttgtttgcaacgaaatcagagatttactatatggatatttaaaaattcagaatttgggggctagagagatggcttagaggttaagagcactggctgctcttccagaggtccagagaacccagtttcaattaccaacaaccacatacagatcacagctgtctgtaacttcagctctaagggatcctataccatcacacagatatggatgcaggcaaaaaagcatcaatgcacatggaataaaaataaataaaatttttaaaatttggaatttacaaataatgaagatccctcactggttcagccactcaccgaggtacctcactccagcaatttcccctcaccagacttattcatttttaaagtttagatgtttgaatatttattgtaaaacagcaagcacaatgatttctatttttataattggtgacgtgatctggaaaaatacttctaattggtaaggcaagagtgattgcaatgcactcttcatttttttctaacttcttaaagtatcttcttttttaaaattaaaactttattataggggctggagagatggctcagtggttaagagcactgactgctcttccagaggtcctgagttcaattcccaggaacctcatagtggctcacaaccatctgtaatgagatctgatgccctcttctggtgtgtctgaagacagctacagtgtacttagatataataaataaatctttaaaaaaaacctttactggaaggagttacagagacaaagtttggagctgatacaaaaggatggaacatctagagactgccatatccagggatccatcccataatcagcctccaaacgctgacaccattgcatacactagcaagattttgctagaaggaccctgatatagctgtctctagtgagacttcgcctgggcctagcaaacatataagtggatgctcacagtcagctattggatggatcacagggcctccaatggaggagctaaagaaagtacccaaggagctaaagggatctgcaaccctataggtggaacaacaatatgaactaaccagtaccccccagagctcgtgactctagctgcatatgtatcaaaagatggcctagtcggccatcactggaaagagaggcccattggacatgcaaactttatatgccccagtacaggggaacgccagggccaaaaagtgggagtggggggaagggtatgggggactttttggatagcattggaaatgtaaatgaggaaaatacctaattaaaaaaaaaaacggggcctagcaaacacagaagtggatgatcacagttagctattggatgggtcacacggcccccaatggaggagctagagaaattacccaaggagctaaagggaactgcaaccctatagatggaacaacattatgaactaaccactaccccggagctcttgactctagctgcatatgtatcaaaagatggcctagtcggccatcactgcaaagagaggcccattggacttgcaaactgtatatgccccagtacaggggaaccccagggccaaaacgggggagtgggtgggtagtggattggggggggtgggtatggcggacttttgggatagcattgaaaataaaaaaaaacctttactataaaaaaacttgcaaataaaaaattacccaccggagctaatgaccagatctttaatagttttgttttttatattgttatagtgtttgtgttctcagcacacttaacaaaagcaacagaaaatataagaaattaatctactcaactaaactaattaaagtttattttgagacaggatctcactatgtagtcctgaactggaactcactatgagcagctggcttttaatttaaagacccacaggtttttgcctcttttgcctctggagtgctgggattaaaggcatgagccagcagcatcccagactacattttaagaaagggaaaaaagctggtcgccgggcatggtggcgcacgcctttaatcccagcactcgggaggcagaggcaggtgaatttctgagttcgaggccagcctggtctacaaagtgagttccaggacagccagggctacacagagaagccttgtctctaaaaaccaactaaccaaccaaaccaaaaccaaaccaaaccaaaaaggaaaggaaaggaaaaaacgaggtaattagcataattagcatgacaaggaaggggtagtgagaaacagtgacacagaaacgcaaaggtttcaagcagaatttattggaagtttggcaagcaacaaacaccctagttggcctgtagatgactttagattgttttgcggtgattttcattttgaagaaggatttccaattttcaaaacagccaggctcaaattaagtattttccatttattttagcagtttggtatagatttgttttcggcttagtgtgtagagatgtttgtttgtttgtttgtttgtctgttttccatcaggacttcatttatgcatgagggcacaatggtagctgatggtgacacgtttctgcctgcctgcttaatcagttgggttcatggcaccatctgtggaagaaaggttttcaattattctctatttttcagtaatgcctccctcgtgaacatctttagaaaaggggccttccaaggtctaccaagtcttatcgattctctctctgtgttttgttgtttgggaggtttttctgtgtaatggccctggccgtcctggaacctcctttgtagaccaggcagactttgaactcagagagatctgcctgcctctatctcctgagcactggcattaaaggtgtgtgctaccgccatccagctgattgcttatattaaagggcaaacatcagtgtttcagctatattagatgcctacgtgaaaaggcagtatggggctggagatgcagctggttaagttgcatgctgtcaaacctgtgagggtgcatacgtgtaagagtacttgccaatacaagcaatgctaaacagttaaatgtctgtttccttctttacctatggatgttgtcattggtttgctttgtaaactatagttttgacgctgtgaaagacagaaggcactacagaaactacaaaatccttttcctttgtgtgaaatgtgaaagttttaagaaaacttataaagaaattgcactgatttgattactaaacgtcagttctacttaatgccaagcttagccaataactatttacctcacttctttccaggaaaatgttcatggtattttattattattttaaaaattatatgtctctgtgtcacatgagtgctatatctgcccagctcttgagctgtttaaggtttactgtaaatgataaaagttgtatgttgggctagagagatggctcagtagttaagagcactgactgctcttccaaaggtcctgagttcaaatcccagcaaccacatggtggcttgcaaccacccgtaatgagatctgacgcccttttctggtgcatctgaagacagctatagtatacttagatataataataaataaatctttttaaaaacagttgtgtgtcttttatttaatttatacaagtgctagtgcctacaggggtgataggaattgggtctcctggagatgaaattataggtgattgtgagcagcttgacacaggtgctggggatcaagcttgggtcctcctctgtaagagcaatatgagcttttaactactgagccacatggttttagttctttataggagacactgttttttgttgttgttgttgttcttgtttttccccctccgttctgccaagtcctggagagtgttcgagaccgtgggtctattctatattctcagagctcaattgttctggaaagtcagagcctaagaggtaggatctcagaagtaggactggctgtggattggctgctcagctcttccctagcttctactccttcactgtgattgtagcttcagggattctggctccaggggcagcagtacagtttagtgcgatctgaacattaggaccctataaacttgtactgcttcagatcctcccagttccttcaaggtctcatttcttttttttcttgataactattactcacaatctggttcctacaggtgaaaaccttatctactccccagggatctcagctgaaccagcctgctggggctcctccttggccagattcaagagccttggacttggtttgttaacaaaggggagaggaggggctgcttatctggggatgtctgagtgggaaaggacaccagggacagtccttgagctagagtcctcccttgtggccaaagtacagtgtaatctgtgggaacagtgaccatttgtgtctcttccttacccttgatgttctttgattgcctagaccatcctcggaatgggatagggtgccttctgtctcctggatactgggattgcatcatactcggcttttgtagtactaaggactctaaccaaggacctcattcatgcaaggcaagtactataactagtgagctacatcctgattatccctccattgtcttatttattatttggttagttatttatttggtagggtctcactatttagccctagcttgcctagaacttgttatgtagaccatgttggccttgaagtcacagatacttgtcagttgcctctctgagtgctggagtgctaggcttaaaggtgtgtaccctagacctggcttccagtgcctttaaattccctgtatgtatgtcaggctgcaaggatgaaatgtgtgacttcaataacaatccaaagggcaagaaagatacctgattcagtttcttccaggtcttggtcagcttgtgggttctgatcagtgaacatctccctagaatatatagtgtaatcaattgtcaataggctaaatccaacaacttagagagacatgaaaatcattcatgcacacacatgaaaatatgacccatttatatttgaactaagacaggctatctacccccaccttctttgagacaggctcttactatatagtcctaaccagcctagaagccactatgtaaatcatgctctacgtagctctcaaaaagaaatctggaagtggcaatgtggtgaggtagagacggtgatggagagctcaaggccagcctttatcccaccagcagtctgggaggcagaggcaaatggaagctactatgtggagcaagttggcctagaactcctgcttctgcctcccaagtgctagaatgaaaggtgtgcactatcttacctgactatttttccattttaaaggaaaaaagacatcaaatgtgagcctccccctgccagagcctgacaaatacagagatggatgcttgaagccaactattggactaagcacagggtccccaatggaggagctaaagaaaggactgaagaagttgaaggggtttgcaaccccacaggaagaacaatatgaaccaaccccaagagctcccagggactaagtcatcaacaaagagtacacatggctccagctgcatacattgcagaggatggccttgtcatgcatcaatgggaggaggggcgcttggtcctatgaaagcttgatagatgccccagtgtaggggaattgagggtgggaaggtgggagtgggtgggtgggtgggtggaggaacatcctcatagaagcaggggagggaggatgggataaagggtttcgggggggagatgtggaaaggggatataacatttgaaatgtaaataaagaaaatatccaataaaaggaaaaaggaaaaaaaagaagaaaaaatgtaagcctccactagcacatgacaaatgacagtactgaaaggacagagcatgaaagttcttctctaggacattgcttgtactcaagagcagtcacatgaatacaaatagacttagggtctcttttactctttgaactctctgacttcctacaaaaatgagagccaggcccacaaaaacaaaatcctacataatttcataccaaaatcatctgtgagaaaaggtacacacaaaacagagtagacaaaaacaatctatcccataaaggaacagcagcatattgcaactgatgtgtggaactacagaccagatcactacaacactatgtcattacagacttcatcatcttcctacgttgcttctcaactgataccaaggataagactaagcacagttaatggataaccaactcctattgtatttctcctccctggatttcccataacccaagaacaattgagaatacatacatatacatggaggggcttgctttaatgttgccagtgatgactttcacattattgtctatgtctctgtcactgtgactggtttcatcatcttcagtacatccctatggagtgataaagacacaggggaaagtcaaaattgaagtagataatttttggctgtcaaaggaggacttttgtcttaatgttaaccctagagttgatagtcttaactgatgagaataaagttgggacaaagcttagtaaacagttgtaccttatggactactgcttctctcccacatcaagatcattagtgtagataccttgataagttttgagaaaatgggccttgggtacagtgttcttataatggtagattgctcacattaatgaaagcaccagataccctgaagaagtttgacttggttctagaatattttagtggctttggttgctgactataatcctcaattggcttttattactgctcacatttattttctttctttcaaaatcccaaaaggaaatctgaatgtggcagtacacatctgcagtcccagtactgatgaggtagaggcaggactgagggctcgaagcccagtttttaatcccaccagccctcaggaggcagaggcaaccagatctctgtgagtttgagggccagcctagtctacagagtgagttgtacagtgagaccttgtttcagaaataaataaggaaagaaggaggagtggagaggattatatctgtctaggtctcattcaccttagctccccagggctagtgtcctggcttcagggtaggcaaatagcagctacttggaaagaatctttactttggaagtaaatcctcaattttcatgtattctatattagcaaatttgcaaatattttaattgccttttggtcatttcagacacgcacagagaggtgaacaatttgtcacctggtttcagctctcaaactttaagcacacatcctctacattgttcatctaatatcacaatttccacatttacattccttttgctggcaacctccaccccaaggcatagtgctaaaactctatgcggtgtgtctaagcacacaaggctgtattgatgctgtgtcttgttcaaattttaaagtgtgtgtgtgtgtgtgtgtgtgtgtgtaagagagagagaaagagggagagggacagagagagagagagagagagagagagagagattggctctcaccttctaccttctctgggacagggtaagtcttatttctgccatgctgcgtagttcaggctaactggcctacaaccttccagaccattctgtctctgcctctcacctcaccatagacattctaggatcacacattcaaggcaccacatctggcttttaaaaacactttttatgggctaaaataccttttcacagacacacactttagaaaatgatactaaaaatacacagtgcgccagaagctgaatgacacacaataaggtagaactgtcaccgctctttctgtatactgtgcttcaataattcggccaagaataaacttgctacgtgtgcagttacactttagtttattcatggtatatactaccaaggaaaattttgggggtatataattaaacacattatcagtttgtttggatttttaaaaagctcttctcgcatacataacattctgactgcatttcccctccttccagtcctcctagttctccacccccagcccagccccatgagctcccctctcccccagatttgtttggaaacttttaaagtgaggctttcgaaaatggatgcactatgggctggagagttagcagagcacttagtagttctcactgctattccagaaggcctgagcttaatttccatcacccacattgtacaactagctcacaagctctttttgtttttgttttttgtttgtttgtttctgtttttgtttttttgagacagggtttctctgtgtagccctggctgtcctggaactcactctgtagaccaggctggcctcgaactcagaaatctgcctgcctctgcctcccgagtgctgggattaaaggcatgcgccaccacacccagctgctcacaagctcttataactcctaactataggggatcttctgggaaacaattgaccatcaattaaatacaatcttagcgtgattcagttttcagtggacatcattatcattatcattatcattatcattatcattatcattatcattatcattatcctagtaccatatctattgcatcatgtttagagcttatccacccttgacatttgtgttttttcagagtcccatcttggtgtgtttctgtcttccttggaccacttacagcttggcaagtgtcctcatcatcggtactgctgactctgtcctcctgaagaatatcttgcaggtgaagaaattcggcagcgctagagaaaaatgtcataataataaatacactggagagtcatttatctcaatgacagactacatgcaattcagaaaccgacatactaatctgttgcttaaagtaaaatcaggggccaaataaatgattgaataactatgatttacttcagaaaaatgccttgaacaaaatctaaaagctgaagcgtgtcacctagagtaaccttttcattgtatagattaaagaactgaaatagtgaggtgaatctgttttttgactataactttgttgcacttctactggcttacttgatatatgtattttgttccccaaacactttccttttaaaagcttcagttttggaattttatcaagtttgttcttgttttttgtttgtttgtttggtttttggtttttcgagacagggtttctctgtatggtcttggctgtcctggaactcactttgtagaccaggctggcctcgaactcagaaatccgcctgtctctgcctcccaagtgctgggattaaaggcgtgcgccaccacgcccggtttgttttttgttcaggtcacaatcaccagcctaattttgattcccaatattcttttttttttttttttttttttttggagacagggtttctctgtatagccctggctgtcctggaactcactttgtagaccaggctggtctcgaactcagaaatctgcctgcctctgcctcctgagtgctgggattaaaggcatgcaccaccatcacccggcgattcccaatatttttaacagaaacagatttgttcctaacagtagtccctaaatgatttaactatattgcaatttgggccctggatcatccacagtggagaatgtgtgcttttcaaggcagtctagaccaagattctacaagtaggtgtggctgtgcttgtgttcctaccctctgttttcatgaaacaaataggctacattttctcctagagtttctgggagttccattatcagttctctgggacactgtgcctcattcactagtcttagcaactagaatgcttctggccttgggaacatcccccatgaaaactgagtacaaaagagaaattgatatctaccatgttcataacaagggtttcagaacactgtgggaaataaaagtccaaagaaaattttttagtcttactgcagtaacacttttttaaaaaactcacagcaacttaccagtttcaatccacaagaagactaaaggctcttttctttttttggggggggggagcgtcatagattcccggctactgctctaggatgtctcatggaagtgtacatttctgtgctgagcatcaaattgtgtggcaaggtcatgcaagatgtatttcttgttcacttgggtggaaatcagctgctgacaccaaaggtgaccattgctgatgtgaagaaagtgttgcacaacttacctcagtggctcatctgcctgatcgtcggtgtcatcatctgtgatcatgaaaaatcaaatgtgaaagtgcagctaggaagcaaagggtggtagaaaggaggggttgggatcaaaggcctcttgagcttaaactgctgggtgcaggagactgctacctgctcaatgatattgttgaagctaaatacaacagagatttttttgtttacaacctgtggaatagttagttggagattggaccctttaaacaagcaagaatataaaaagaaaaaaaaataaaagttgtcgtttactaccttttttagtgttttaaattttgtatttacacataccaaaaaaatagtattttcatttattgttttgactatttgtaagtaaacttggaaaaagatcccttcagcattatttagcactttttcaaacacattaggttcttgaaatgggtgaaggaaaatgagcttaaagggggatgcagaacaaaaaggtacctgagttcctcttcagaccgggcccactccagcactaaaggagagaacccgagctgctgagttcattcccatgaaggcttaactgttgggttttggttttggtttattttttgtttttggtttttaaagacctagactgtcaacacataaataaaaaccaaaatgacaacaacaacagaagcaaaaatatcaaggtgggggttgggggtggggttccaaggtgcaatacttgcccagagcagaggacggcccaggctggaatcccagaactgcgaaagaaacaagagagaataaaaaggcaaactgaggattaaaacatacacagactcaaatgcaaataaaacttgtgtttaatgtgttagaagtcaaagcactttgaaaatatcctcacatgtattccatgttttaggaggtataggagcaagaatatatagattttatgggctgttatggaggaagcttaaacaactttattgatattttgtttgtttggaggtagggtctcactgtatatagccctacctggcctggagttctctatgtagaacaggctagcctcagagttaaagaggtttccatacctatgccttccaaggggctagcattaaatgtatatgctaccatatctagctcactttctgtttcttgttttgttttgtttttctcaatgcagagtttctctgtgtagtcctggctctcttggaactcactctgtagaccaagatggccttgaatttagagatccacctgcctctgcctcctgagtactgagattaagggcacgcacctccactgcccggcttcccgcgtactttcttttatttttttttatatattttttattacatattttcctcaattacatttccaatgctatcccaaaagtcccccataccctcccccccccactcccctacccacccactccccctttttggccctggcgttcccgtgtactggggcatataaagtttgcctgtccaatgggcctctctttccagtgatggccgactaggccatcttttgatacatatgcagctagagtcacgagctctggggggtactggttagttcatattgttgttccacctatagggttgcagatccctttagctccttgggtactttctctagctcctctattgggagccctgaaaatgaatccaacgtatatgttaaatgtcttagtttataagttttttgttgttcttgagtaggtccttcagtttgatttaggagcaataccagataacccacattcgaggagaacgtagaaagaagatggtaactgcaggctcatactggaacattctaatctataaaagacaatcctttccaacagtctaccacctccaggtccacatggttaactaacactgatttaattcattcgcaaccgtctgtgtcattctggttgcctccagttaaagggaatctctggtttagtttgacagctttggagaaaactaaggatcctaggatgatattacttagatatcaagggagaggtggcatgagaaatgaaaaccctggggagacaggagatggtttcccctttgctcctggggaatttgaaagaaacagtgtccctggactcgtgcccagaggagtcactttcctctttccggtaactataaaaaagtaagtaggtttttacctttgaaaagccagttttcttcatcctcgaattctggcaagtccattgcactgcattctgcttcagaggtcttggggctttgcttttcagacatagctccgggattcggcttctgtggagggagaccttgttggtggagctgatacccaagtctaggtgggtgctgtgaataaaggcctgagggcttgggccagagcttcaagtttttatcacagctcgtgctggggtggggtcaagttgagggggcggagtctggagagcctcgggtattgggaatgggtagaaccagagaatgacacacctctgtagtatcctaaatgcctatcttccatggaggtcttagaaaacattgacctctacattttccttcagctagggtaaaagtattaaggaaatctctgtgatctagtgagtattggcatgaaggagtaggtcctgtgtacttctttttactgatcaggtattagatcttccaaccatggagcttgtccttcccaatctacccttccagtttccagcacttgtatagaataggagggtgggtgggatcagcaggcagtggtgtaggaaggggacagtggttgggaaccagtagatgggaggtgagacctagaggtgaggaaatgggccaggagcaggcagggagttctgcagaactgtagtataagagaatgtcattgtactttatacccctatcctctaagggcatggaaaaaaactggagtctgacttttctctctgctggggtggaaaagcttaacagtatctgagcgaaggctgggctgtaggagccattcttatacccttcctttcagtgtgtcagatactgggattcccagagcttgactttatctatcaacaggcacagactgttagttcccagcagtattcaaggagcacagatggtgggggtgggcatgaggctggaaccagcgccatgacaggtggggctcgtggcagaagctatggggttatgtggggtaagatggtgatgggcagagaggtgggacacgaactagaaagtagcacactttggtagtacctaccctaaatgtgcttcctcattagagggcttagaacaaacacactcgctgctaggttgcggctctatgggaagcagcaagaaaatgtctgatctagtttaaagccttggaggtgggctgccctatgttcttcctttggatgcattaaatattgagacctcctaccttacaaagccagcaagaactcactgcacaactggactcgattttccagtggatctgtaatgagcaccagactttcaaacagtccttgtggagtacttaaggtgggggaatgaacgacagggcatggtgcgtggtggtgcacaggtctggggggccagaaagtgaggtggtgtgctggagttggggcagttcgacgttagaagagactgtcacacctttgtggcagcaggctaaaggctcatggctgctctctgagggatgatactagagaacagcgagtggcattgttctttcttcaactaccctagaagcacaagaaatggctgtgctctagagaatgttttcttgacacaaagtctcagtatgtagttctgctggacccaaattcgttatatatatcagattgtccccaactcacagagatccactagcctgcttctggcctcccctagtactgtcattaaaggagtgcactaccacactgtcctttggttgctattttgtgcagccatttctgtgcttttccttatattgggccaggtagtggactgccttatttataaagatagaagacctcactttggagcacgactctctttttcagagaccctgtacagtcctcatttagatttcccagcagtaattatggagcccagaagataggcttagggtcatctgggagaggagtaggggaggttagtatgggggaggttgggagtctaggaagagagaaaatctgatctttgtagtatcataatgttccatccacattggaacacttagaaaatactggctcctagattctctatcatctaggatggatacacaaaacaaatatctgtgatctagttaatgttagggaggagagggactggatcttcgttgggtccggtactagcttggctatcctcccaaacctacaacacagaccactcttctccaagtgtggcgacggtggtggggaggagcacgtcaagtgtgtgtgaaggggccaggtggggggtataggactagagaatgtcaagcctctaaagtatccgaagactcacattggtcggaggaccctgaaaacactgatgtacactctccctcacctagattggaaaagctaagaaaacaggactttttggtcattgttgttggggtgtggagatttgcatctatagtccttcttccactagatcaagtactgggcatctcttctttataaagatcttaaaaccttattggggatattgattgtcttcctaaaacaaacagaactaaaccaaacagaatgaagccaaggcacctaagctaaccttgacttaccttaccatttgattttgaagtagtgcttgagaaacacgaagtgggactagggtgcagtagagggagataggagggtggagctgggggagggggagggtagcacaggggttctagtggggtaagaatagaaaaagtcacatctctgtcacatcctgaaggttcgttgtggttggagagcctagaaaatactggtgtctaagttctctttcagttaggttggaactgtgaagaaaatgtctgggacccagttaatattgaggggttgaattgtccctatgttctcccaatcactgggttttataacagacttctttatgccttctacgggtgccaagacctcacttctgaccctggctttcctttccagggacaggcccagaccgttagatttcctagcactactcatgcagcatataaggtgggctgtgaattgggctggaggtggggatgtggatcaagagggtgcaggtagggatgtatgatgagagaatgacagccttctgtagtaccctaaaggcccagtgaatattctgtcacatcaccactgaaaattgaaaactatgctggtgcctagtctccccccagctaggatgaaaagctaagaaaatgtctgtgatctagttcatggctgtctgtatatgcatacatatacgttggtggggagagatctacctgttccttgctcttcctttcactgggctatggaggtgacccatagtgcctccagttctggtattggtcttcttaagttgaaacagttaccgagatcttactgaagaggttggctcttcctcccaactgactgtacagacctttagatctcccagttgtacttgccaagcccagaaggtttgtccccttggccttctggtatacagaatttgctctttctgacagttaaaaagcaagcaagcaagcatactgagctcgcttacattaacggcttgctccccacaggcatttctttcttttttggggagagggggtgtttccagacagggtttctctgtattagccctggctgtcctggaactcactttgtagaccaggctgtcctggaactcagaaacctgcctgcctctgcctcctgagtgctgggattaaaagtgtgcgccaccatgtccggcccccacaggcatttctgcagtctgttcctaggcagccatttctgcagtccttctgggttctagtttgctttctattgataagcggcttaagaataattttagggtttctagtgtgataaaacagtatgggtggggctggagagattgctcagtggttaagagcactgactgctcttcggaaggtcctgagttcaaatcccagcaaccacatggtggctcaaaaccatctgtaatgagatctgatgccctcttctggagtgtctaaagacagctacagtgtacttacatataataatagtagtaataatgataataggagttaaaaaaaacagtatgggtaacagtgacttgggggagaaatttcatttcagcttacaattctcaagttactctcagggagggaagtcagagtaagactcaaggcaaaaatctggaggcaggaactgaagcagaagccttggaggttgcttactggttgactcccttggtttgctcagcctgctttctgatggaacccaggagcacctggccagggagtcaaggcctactataggatgggccatcttatagcaaaatgggggtggggagtcctacagacttgcctacaggcaatctaatggaggaatttggtcaggtgaggatggctttagcctgttttttttttttttttttttttttttttttggttttttggtttttcgagacagggtttctctgtatagccctggctgtcctggaactcactctgtagaccaggctggcctcgaactcagaaattcacctgcctctgcctcccgagtgctgggattaaaggcatgcgccaccacgcccggctggctttagcctgttaagttaaaaactaaaacacaggagataagggtttttatttcatccctctaagtactttcaaacttccctctgaaacctcacaaaccaggccttcatcgcctgcatttctctcagcctccctacctcccaaggtcttaatggagtggtccattaagcagtgaccactcaacagcttttctagcccaacattccacactctatcacaaccctttccaaaatgcgggcaactctgtcacagcaacgaccatactggtacaagtttctattctagtttgctttctcttgctgtggtaaaatactgaccaaaaccaacttggggaggaaagggtttcttttaccttactgggtatagtccatcatgaagggcagccagggcagaatcttaaggctggagggagcctggatgcaggaagtaaagcagagaccacagagaaatgctgcttactggcttgcctaacttgcttttttgtacaatccagaaccccttgcccagaggtgatatagctcaggggacctcctacctgtcctagaggagcaagcaccatccacaatgaactaggtcctcccacatcaattattaaataagaaaatgccccagagattggcctacaggccaatctgatgggggaattttctcaaccgaggttcccttttcttagatgaccctgctgtgtgtcgggttggctagaaactgcccagtacatgccctccctttagtctttcttgagagctgagtgccttgccccaacatggcctctcactgctgctgctcctcaggaagaaagcttcctgcccccatttccctttagtctcttgttttttatgtttctgtctttgttgaaacagggtttcactatgtagcccttgctggtcaggaacctgctatgtagattaggctggcttcagactcaaagagatccacttcctgcttctgcctcctaaatgcatggattaaagatgtgcaccactatacctggccaaggttcttgtggggaaacacaatgggcacttaccttaatccaggacagtggcaggtgtgaagtggattacggtaccattactgtcttggggtcttgattgtgttcattctccaccaattaaagaattaaaaggcaggaagaagaactcaggcacactagacaacaatatttaacacactttattaaatatatgtgaagaagggcaccatacacacactcacacacacatatgagagagacagacagaggaggtggtggtggagggaggcacacatgaagaaaagaatccctgcagggccgagaagggatttggaaagccaaattcagtttttaaaatctggggctgggaagccgggtgtggtggcacacgcctttgatcccagcacttgggagacagaggcaggcggatttctgagttcgaggcctatttttttgccatctttattactgatctatgtggcctctttgcctatctatctgcctgtcagggaactacccaatttttagtccctaagcactgaccaagccttttagagcccaaagaccacacaacaattgagtttcaaatgcaaaacctttgcctacaggatttagatctatactgctagattttggtttggtttgattgttttgttttgtttctttttttttttttaagatttatttattatatgtaagtacactgtagctgttttcagacacaccagaagagggcaccagatctcattgcggatggttgtgaaccaccatgtggttgctgggatttgaactcaggaccttcggaagagcagtcagtgttcttaactgctgagccatctttccagcccttgttttcttaaaatttatttgttttatgcatattggtgttctgtctgcatgtaagtctatgtgagggtgtcagatcccctggaactggaattacagacagttgtgagctgctacgtgggttctgggaattgaacccaggtcctttggaagaacagccagtgttcttgaccactgagcagtctctctagcccctttgctttcttttttttttttctttttctttcctttttgttttttaaagacagggtttctctgtgtagtactagctgtcctgaaactcgctttatagacctggctggccttgaattcatagatcctcctgcctctgcctcctgagtggtagtgtagattggtttcctatctggaatgagtagaagcttgttcatatctctccaggaatagtgcacacaacacaatctagtttttaaaatatatataaatcctggctgtttaaaatgcctgttttcaccagttgtgatggcacataccttcaatctctacactcaggaggcagaggcagggggatttccatgagttgaaggacagttttgtctacagtgggagttgcaggccagccagggatacagagtgaggccctgtcttggaaaataaaataaatgaataaatttaattaaaaaaatagatgcctaatttcctcatctgttgcctttattttgttaggctagacagtattcttgattattttggttttaggcatattatttttatcatatatctcatgttaagtgcagagaattaaaaagcagtcacactgggatcttaatggctagcagagtttgacattatccagaaacattaacattaaccttccttaatggctttctcaactagtcctctctctcccaaagtttaccttcctcacatctcagcctcatatatgagtcttttttttttttttttttttttcgagacagggtatctctgtatagccctggctgtcctggaactcactttgtagaccaggttgcctcgaactcagaaatctgcctgcctctgcctcctgagtgctgggattaaaggcgtgcaccaccattgcccggctatgagagtctttataacaatgatatattaatatttgccccacacatgcacaacatgtgatgctagacctataggaggaactatgaatggaagttactagaaactgcaccttccatagaaacttcttcaaggctgattaactgattagaatttcaaagattatggagaagttggaatactgttggtccatagcttaatttagttatcttaaactctatttagcctccttaaaaaagcttttctttagaaatcagattcattcattttattttatgtggtttttttgttgtttgtttgtttttgtttttttcttgagacagggtctctctgtgtagccctggctgtcctggaactcacttcgtagaccaggctggcctcgaactcagaaattcgcctgcctctgcctcccaagtgctgggattaaaggtgtgcgccaccacgcctggctattttatgtgttttgccttcatttatgtctgtgtaccatatgattgcttggtgcttgaggaggtcataagaaaacatcagatcccctggaactggctatgagccacctggtgggtgatgggaatggaaccgggctcctctgaaagtcagggctcttaaatactaagccagctcttcagcctgatattagcttccttaatagttatttcttacccatctcagttcctgatccattatcctgtgactatcagagaaaaaccatttggaatgtattaatttaacaaatcctcaatttccatgacccaaaacattaaataacatttgagacttatagctgagatttttccacttgcctgtaacctgttatctccataatgtgtttaaaaagtgtgttggtttgtgactttcttcttcctgagctgcaatcacttctacttggcttcagaataagctctgtcttaccctctttgaggtaagagtggtatttttgtgtcaacaattataacagcacaaatagacggacacaaatgggctaagggattctgatactacttcattcactacagatattgttattctaggtttgaactctgcccctttctaggcatcacttagttttcttacctagcacatcagggtattggggaaaaaaaatcagttaacctgtacaccagaattacctggccaaggtaggaaagcggggagggctaaaaacagatgcccgattactacatcatagagattctgtttggggataggtcctaaataccaaagtttattactttccccaactagatctcacaagttcaactgtatgggagtctatcagttggccctttggtgaaggcagttttaaagataaacaagtcattttcatgaagattgacaaaagaagctttggggacagattagagactaaaagaaatggtggaagtggctagggtatagcttagttggtagagtgcttgctcatttcagcccactcttacatttcataacctgggaaactaagcttacataaatcaactttgccaatactgactttgatagaatacaactgtagcaattccaactagagtggaggtaggaggatcagaattccagctatatagtgagttcaaggccagcctgggatctatgagacttgggaccagggtggaagacagccagagtccacaggcctaccctttggggactggggtaaacactactacagtgagcaagtatgtggtgaaaagatggcagagaaggagaagcagagcagtttgtgttctatgaagagaggtagaactatgaggaacagcctgatgtgagaggcttgcacagccaccatgatgatgtttgggactgtgctgccgccaaaggccatgtatgcttctgtggccctatagcagcaggcatcagtgtcaatgaccatggcccatgttaccactaaaggccacatgggagtgcacggtctcacacgccatcagaggaaatgttgctgtttgagggcagtacccagccgccgcctcgccccgccccaccccccttgcacgctgaggcacctgggagagctggccccgccccagtgtggggcagtgcaggagggctggccccgccccttgcctggccttaattgcgtgagcgggaaagctggcccctccccttgctcgctgaggaacctgggagagctggccccacccttgctcattgaggcactttggagaaggaggccccgccccttgccatggccatgagggctagtgggctgaccaactcagctaccactcaggcccagatccaaggctttaggttagcccaccccaacacataacctatctatgatctgctgaagtgcgtgcagggggtctgtctgcagaaccaaaactgcagagtctttgtgacacagggcaacagtaggatatcctagagaagtctctgtgagggtctggttttgatgatgtagcagaagtcagaggcctcgaaccagaccaatgactcattgcaataaacatttgcaagttaacatgtgtggagaagggttggagagatggctcagcggttaagagcactgactactcttccataggtcatgatttcaaatcccagcaaccacatggctcacaaccatctgtaatgagatctgatgccctcttcaggggtgtctgaagacagctacagtgtatttatatataaataaataaatcttaagaaaaaaaagatgtgtggacaaaagggtatagtgtgagacacactgtgacacactgcagattccacagcaaggtttttttttttttttaattttaaaaatatttttagggggctggagagatggctcagtggttaagagcacttgactgttcttatgaaggtcctgagttcaaatacacatggtgacttacaaccatctataatgggatctcacaccctctactggtgtgtctaaagacagctatagtgtacttagatataaataataaataaatctttaaaaatacttttagtttttttggggggaggggaggttgctagagtggagggttgatatgcagggatggtaagattagtgggattggagtgcaggatgtgaaattcacaaagaatcaaaaatggaaaaagcaggaagagggaggataaataacagggtatttttttttctttttactggttctccattttacttcctgttattcatcaagtggctcacaactttctttaccttcacaaaagctcccaatttgcaattcactttctatgtatcaccttctcccccacctccccctttgagatgagagtccaactcttgctgttctggaacgtgctgcgtataccaggctacccggaaactcacagagatttgagtttatgcctacttagtgctgggattaaagtcctgtatcatcatacccccttttaaaaaaagaaacatgtattctacttcgtatctttgtggtttagcaaccttgtataatgctagatctcaaaggcttgaaaatcaagagtagaccaggctagagataagcagcagtcagctcacctaatgatacaacatgcattttgtcatttctcatctcgggccttttgctgatcctttgcagtcctttcaagatccaggttctgtattaggaactgaaacatacccaagatctctttctactcattggtaagtcagctttgaatacacatgctatagtttcccaatttcttcttttccccgtgggggggggggtctcttgcttctatgtatttctttggctggaaaatgatagcaaatcgagtgttaccttactggatctcaatttcagtcgtgtcaatattagagcccaaaaagtctgaaacaagacagatttctttgcaaagacgttggacaagtggacacaggcaaagaagagcacagcagctaactgatcagttcaaggcccgttgataggtatttaaagtattagtggtagcaggaagaggggctctgaatcccctaactaaggaggtattgacagtggatagcagctgttggcagagggaaattcaactttaagagtgtggcccttggtagttgcagtgaacgggcaggcccacacccaggtaaatttggacagcacaaactggacttgtggtttgtctgtctgtctatctatctatctatctatctatctatctatctatctatctatctatctattaaaaagaggactcaatgttgagaaggaatgaagtggttagggattggtctgggaggagttgatagaggagtagggagtagtatgagcaaaaaacactatataaaattttcaaataattgatgaaagcatattaaaagattagtggtcatttactttatactaaaagattagtggtcctttaatttgtttttagcattggataagtgatttacctaagcttcagtctggctggagagatggcttagtgcttaagaacccttgccactcttccaaaggactggagttgtgctcccagtacccatgttgaacagctcacaactacctgaaactctagctctagagggtcgatgtcctcttctgacctctgtgggcattggactcttgcgaacatgttcatatgcacacacacaaacactcataaataaaaaataaatcttaaaaaaaattagtgggggctggtgagatggctcagtgggtaagagcacccgactgctcttccgaaggtccagagttcaaatcccagcaaccacatggtggctcacaaccatccgtaacaagatctgactccctcttctggtgtgtctgaagacagctacagtgtacttacatataataaataaataaatctaaaaaaaaaaattagtggacatttagttttttttccccattggacaagttggtttacccaagccttagcaaccctggttctaaattttaccccagctcaaatgctctaagtactgtgctaagcacgtggctactttgtgactgtcagagctttggagtccagaaagtggggaggatagagagtggacagcttagagaatgaagtaagctttaagacaaagcagttaggaagctcattttccctctcaagaaggagttccttatcttcaagttagacatcagtaagcctactttactgaaaaagctcaagcttttggacagtgagaatttttgagagaaaccagaaagctgcggaaatgttaaaagccctataggtatgtaaaatgtgattgggctgaggtctaaggaactgaaaggcaaggggctgcgggcagtggtgacgcacgcctttaatcccagcacaggcaggcggatttctgagtttgaggccagcctggtctacagagtgagttccaggacagccagggctacacagagaaaccctgtcttgaaaaaaaaaaaaaacccataacaaaacaaaccaaaccaaaccaaccaaacaaacaaaaaacaaatgcatttcctcagtacgttgtgtacctacctcttaaaaattataaataaaatatcttggcagggtagcttttgtgaatacaaggactcttgtcacatgccatatctgggagccctgctcctgtttgatttgagaagtctaaatttaacctattcttttttttttttttttttttggtttttggagacggggtttctctgtgtagccctggctgtcctggcactcactttgtagaccaggctggcctcgaactcagaaatccgcctgcctctgcctccagagtgctgggattaaaggcgtgcgccaccacgcctggcttaacctattcttaatccaactgctgacatcatagcttgattaaaacctactatgctatcttaagtgctatgataatacagacaggaatttaaaacatgatttttttttcttctcatgataccataatattttagttgtggtggtaaaagaggagtgctttctcctttctgaataaaaagttgagatttgtggactgacaaatgtaccttttctggagacacttgaatagcatccccaacgtgtactataatttttaaaaaatctggataataggaaacacatttgcagaaatagcatatactgtacacaagtgctaactaggtaacaaacgaggggacaatgttactagatctttttttttaagatttatttattatatgtaagtacactgtagctgtcttcaggcactccagaagagggcatcagatttcgttacagatggttgtgagccaccatgtggttgctgggatttgaactcagaacctttgaaagagcagtcggtgctcttaatcgctgagccatttaacatggggaaccagcccaggagaaagcagtttgttgcagtcaacaaagctgaaaaaggagtggagatctgaagactgctttgacatcagccatggagatgcagagtttggagtttgcccagctggtttcctgccttgctttggggatcacagttaattaagttgaatgaatctcagaagagaccttgaactttggactttttaacattgttgcaactgctatagactatgaggactttgaaagttggactaaatacattttgcattatgctatgtttaaatatggccccatgttactagatatttctacttacaagggccacaccaattcatggacgcaagactgccagatcctcttagagaacattctactaaggacacaaatacttcatttttcaacctagttcctgagttcccagagcatcctctctatgttcatagagctctatctgcctgcacagatttgcacaccatgtgactaagatgcagggtatcatcaaggggaagcaagaagacctttctgattccattaatggtgggtgcttcaggttaacgcatgagctttgcatctagggcacttaaagaactggtaaagatgcacaatgttgccttacaatgttaaataatgtgagcttaaaaatggagacctgggaagaccattaaaaaatagtgaaactgttcacttgacagtgtagaagtggaaattcacactgcctaatacctcacagttagtaaacagaaaaacaaggcatttggatacaggataaattttgggttgaaagttttgtggatgggttatcctgtatccaaatgcaggtacaggggatggagaagagactgaggaaatgaccaatgaatatcagcccaacttgagacccatccctgacactattaatactctgttatgcttgcagacaggaagctagcatgattgtcctctgagaggctccacccagaagctgagtcaaatgaatgtagacactcacagctaaacagtggatggagcttggggactcttatggaagaataggaggaggaactgtgggtcccagaggggataggaactccattgatagaccaacagagtcaactaacctggacccaaaccatacacaggctggacctaggcctccttttcatatgtagcagatgtgcacctcagttgtcatgtgggtcctgaacaactggggcaggagctatcccaaaagctgttgcctgtctgtgggatatgttcttttagctgggctgccttgtcaggcctcagtgggagaggaagcacctagtgtcacagagacttgatatgcccagggaagtggaaggagatacccaggaggggccccaccctctcagaggagaaggggagagggagatgggggaagaattgtgggagggggttaccaggaagggggctgtgagtgggatgtaaagtgagtaaaaaaaatgtataacatgaataaaagagcttgctttaattaatttggctctgatgatctgagtcggtggcctttctcctcccacatttgggattaacagtaagattaaataaacccttaaatcaatcccagttttggtctgattccttctttcccggttttccctttttgcaacaggaatgctttgtgtcattgtgctttggcagtatgtaacttgtttttgatgttttaactgcttaggtagagctgtgtttttaggaggctttggactggacttttgagcaatactgaaacagttaagactttagggatttttttttttttttttttggttttttgagacagggtttctctgtatagccctggctgtcctgggactcactttgtagaccaggctggcctcgaactcagaaatttgcctgcctctgcctccggagtgttgggattttaaaggcgtgcgccaccaccgcccggcgaatttagggatttttacggactgaaagcatcttgctttattgttacccagcacccagactcataaaatggctgccactgaccaggtatagtggcatggtgcatgcctgcgatccaggcaagttgggaatgttaaggcagaacactgcctgtgagtttggggctaacctggtgggtttcaggctaccttgtgtgtgactgtggtctggccacctttaaaagaagtaacaacaaaacaaagagcagagaacacccaaaaccaaaaagtaaaaaataaaataaaataattccttaaaacaaccccctcccccaaaaaaccttaggctgttactttttctgtatttttaaaagaattgagaatggaaattggtaaaggaaaatgagtttacttataatttggacaaggcagggaaagaaagattcattgtctcttccttgtcatgcggaaattcagggttctcagtatggactcagtcttgttaacaaaagaatctaacaaaagaatcacaggtagacacggtggtgcatgccttgaatggagcacttgggagccagaggtaggtaggtgtatctccgaggccagcctggtctacatagggagtttcaggccatgcaaggatatatatatttattgtaagtcagtgttccctccacctcttccccccaaaaggacagaccaaaaaaaaaaaattcaaacaataacaaacaataaaactcccacagcctagcctcaagaaaaaaacagataggcatacagaggatgcaagctgtcaatctcagcagttgccaggaggagggagagaaaagagaaagaggaagccctgctttttgagttaggatccaaggtggcatgttcagtaataatgcaggttgacaagaatttgtaggatggtctccaggcccacctggattaattattattattatttaaaaaattattgacttcctgtgtatggatgtatgagtgcctgtgtaaatttatgtgcaccccagacccatagtgctcttggagaccagagagtactggatcccctggaccttgagttacaggaggtgggagccacttgatgtgggagctgggaactgaatatgagtcttctgcaggagcaataagccctcaaccactgaaccatccctccagccatgggctaactgttgagggtggagacgctagtatgctctttttctaatctttggagtgatcagaatgtcagtttccacctagagccagaggcagagctcagaatccattctttccaccgggaggaagtttagctttcacttaaaggaactctccacccgggcaagagaactttaagttgtaaattggacggggcaggcaatgggagtacaggtgaatagaggaccacgccagaaaggtccatccacaaggctactaaccctatctacctaacaacagcattaaacttggaagaggtgaacagaaagcagcagatacacatatggtaacctgagcatgaggtaagctgttagaatagtgggaaatctcttcttccaccagcatggggttactgggcaagtttgaattggtggggctccattattttagggctcctattttactgtgagatggacataaacccttggaagtcatccacaccaattttttctagacttttccaatacatttgtttctattgtgttctatgtgttttctctgttttcattttgttttttgagacagggtttctccatgtagccctggctgtcctggaactcactttgtagaccaggctggcctcaaactcagagatcctcctggttccacctcctgagtgctgggattaaaggtgtgctacactactgctcagcttttcaacttgctcttttcaaagaaccactgtcattgtcaacaacttccactgacagaactaggcttatttttatgtgctctgtgtatgtgtatttttgagagttcatgtgtgcctatggaggctggaaagctgagctctgaactgctgagccatccttctaacccttattttgctattttcgatgaattttgcaaaggcattttttaaaaaatctagtataactggattaatcacctgaatacaacttaagtagaagatgctgataaggagtaacttgctggtaagacgcaggacttgctaagcactttcatatttctacactctacgcttaaacatttatgtttagtaagatcattcaaaaacagctttctacttagccatatgtcaaacactgggtacaatgaaggttcccaaagccaataaatggcatgaattactacttatacaatcagacacaatactactcaatgggaggagaggcaatatgcaaagtgttgtcattaaaaggaagcttcaagtaatagtgatctctacaaagtgatttatcattgttatcagtagtttcagccctgattattagccccagctggcctggaacttgctatgtagaccatgctgactttgaatttactataatcttcctgcttcaggctctggagtgctgggattagaggtctgtgccactacacctggcttgttgagttatggtgttcgattgctaccaaagggggttgagaatacgtttgatgatcaccatcatagcaacgttttcataaggcctaaacttgtgtaaaaattaatataaattaactttattatacaacatgacaaattgtgatctggaagtgtaaaccaaataaactctcctttcctttttaatcccagctctcaggaggcagaggcaggcagatctcttagttagagaccagcctggtctacagagtgagttcaaggacagtcagggctacacagagaaaccttgtctcagaaaaaattacatttaggtatttatttgtgtgtgtgtgtgtgtgtgtgtgtgtgtgtgtgtgtgtgtgtgttatatgaggtcagaggacaacttgtagaagttagatttctccttctaacatgtgggtcctggggatcaaactcaggtcacctaggcaacaagacttttaccatctgagttactgtatctgcccctaagtaatgatattataatgatgaaaacctaaggaaactgagacggtgtgccccaaagccacacggttcaactcagtaccatgggtttgtactttattggaatttgcatcctgagaataaaattgtatctgacaagtgaacaacgacagaagcagcagtgggagtttcagaggcaggtagccttcttttggcacagctgtatataggttgagttcttccaggagagtcagtcctggactccagggggaagaggaattcattccacaggctacataacactacaagatgcatgaatgttcttggttcgacagacatagccactatgattctcttctgggaaagctgttccaacaggaatccttggccaaaatggagaagttgtttcatttttcaatccaatctttagaacaacgccagctctatctggatgtccttgcagtagaaattcacacttatatataattagtccaaggacagcaaactagcttgtagattatataatttcaaacatttgtaacttgttccaaagtcctggcattagaacaattttcaactatttgcttacaataaaaacagaaaagcaggaaaactatgccaagataaaagcaaatcaaagaagcaggagtaaaaggaccatttgagaacttattgccttgattaccatacaggctttacacatagaactactttcagatgctgagaaactgttacttagactaatgctagaacatgacaccagaacactgcaatcctgtacatttgcaatcctgtgtgtgtgtgtgcatggacacaccccactgaatcagttcagttctagagtccagagacaaaccaaaactgaaggcaaattataatctgaatttatagcttaatctagtcaattctcatttattttctctctctctctctctctctctctctctctcccccttgcccccaatcattcaggactaggacacaatgtgttgagaggccaaataattttagttcttcttaaaagtggctcctaacattttcattatatggatctctaaattccttccccattttcaagtatatattaaagtacacttaaggacagctttctcatttctattaattacaagcacacttccattcacagcttttaatcagtgtcagtaagcatgtcaatagacagaacaggaaagaacatgagcaaaatgcatggtgattccatgtgttgtttggctggtgtagaaggaatgtgataggtcagtgtgtggcctttagtgttatgtgaattaatgattcttgagaaaggctcaaggctactttccactgctatttttcatctactctaacctgagggccactagtttacacccacctgctttcctccctaaatcaagtattaatatagtacaatcactcatgtttaacaaatagggcattagcaacaaaaatgacttgggaaaaaaattgagtcagaacactctgtaggatgttactgagaaagaaaacataatgcagactgaaagtcacatctacgtagaaattatataatcatgctatccaatatttcttttagtcagcttctaagcacacagacacatgaaaaagaccctcaattcccctgtgaggtaggtccagaatattgtccccacttcagcaatgaggacatgaggtacagaggaattaagcagcagagctaggaatgaaaccagaagtgacttgggtttgaactttcatgccattttcctttccaccgaattttctaagtccgttcggatagatccttttggtgagcagggaacttggtgagacactgaaggagatgtgaaattgagcctgcaactcttcacacagtctaagcggataccaatgtcacacctgataccaactgcgtagtcagattccacatggcaaacagagatcccagcccctccttcctagggaaactacattcacttttatcagcacagagggaataaggtctaccaggcattgggttctttgagtgtgttttcactaacacacatcaactagcagccagccagcaaactgaactcaaactgtgtgcaaggcactgtgagtttccaccaagtgcagatccgagaataaccattttcacacactgcacagcaaagatcttctgtggcttctcagaaccacagaatggtaactaacctctcatttcctgtctagctcaaggttcaaccctctacttttacagaggaaaacactgacacataatttagaccacttgcctggggccacaatattagatagtttcttcattaagtctgactttgacaaaattcacagaaaatggaacatattctcaggttgccatcatcaaaataaaaaggctggctcagaatcaggtgagtggaaaagctggagcaagataagaattatacacatacatacatacatatatacacacacacacatatatatacatacacactcacacatggaaggatatacttatagatacccttctattatttttagctcacaaagtatatgaacaagtattaataaacttattctttaccacgaaaaatttcccaacagttcaccactcaagggaacctgaatgatttgatagttgtaaaatagacctttttttttttaaagaagcagacttaagtccaattataagtataattggacttaatttcaatgaattgaatacttccagtcaatttaggaaaaagtatttccactatgtgaagttagtccaatgaatcagatgagtgtaaattctgtatttgcttaggacatacagtaaactcaaataaaatattgtttggggtctttgtgttcaagtaatggtttatttttaagtggcagcttatctgtaagcaaaaatgaaggtgctaaggatttgtaaaggtctcaccacatttgaaaatacctaattgttgttaggcttacaaatggtattgagctctcctaaagttatcaaaggcaacaataattctcattaaaaatggcaatgctgggcacaaatacagtttaatttctgagatattaatgtttacaggtcatgttaatataaaaaatggggaattattattattattattattattattttggtttttcgagacagggtttctctgtgtagccctggctgtcctggaactcactgtgtagaccaggctggcctcaaactcagagatctgcctgcctttgcctcccaagtgctgggattaaaggcttgcgccaccactgcctggcttgggatatttaattcttaagtgagttttggtagggtcttcaatcaaagacagtccttccagaactgtgttaaattctatgcttattagcattaaaatcataccaatttttaagtgcctggtctattctgtgatattttgtcattaatatacaacattattagaagataagtaaatggatttaaataagagaaatataataacctagtgctatcatgcctacttgaaaagaagcatttctaatcattattaattcatttattctgcttccttctacataccacgttatctttgaaaaagacaaggcactttcccatctatttctaaagttacaataatctttttcctaaattaacatggggtaatgtgggaaacaagtagaggacatgtctgagacaagggcaagtgacatttgcccttatttttattaataatatagatgctactggccttttacataagctttaaattgaccaattggatcaatttattaaaccataatcttggatcaaatgagaagtaacaaaaactaacttcctttcctttcctttcctttcctttcctttcctttcctttcctttcctttcctttcctttcctttcctttccttttttcttgagacagcttgtagcccaggctggcttcaaattcacagcaattctcttgccttagccccataaatgctgggattcactaatttatggggtataaaccaccatgccaggcttttcagaataagaaaaaaaaaaaaagtcctttaagttgaaatctcaaagcctatagagatttagaagctttggcaaaatgttatttcaaaactttttttcctttggaaactaccatggtaataaaggagtattatatatcaacaaaattattctcttttttagtcaaaaataactttcacaaaatacttggctaacccaatagaaaaatacaagttacattctatcctgaggttaaaagaaaagaagtttggaggggaagggttagcatttgctgtgactaatttcaatgaaaaggaacttcttccccactcaaactaccagtcacataaaaaagaaaagtaacgagaaaactatcacctgtcaatcaatatactgaacaataaaataatacagttattagtgaggagttcaaattgatatgacatgtaatgataaatattttaaatgacaaatactattgtaacttgaatgatacttggtcactttcatatacaatctattcctgtcttaatatttgtttcatggaaacaattcattacacttcttgattttttttttctgaacaaaatgaagtgtgatttgtacatggcagaaaaaaattcctatgatgactatttggtcaaattctaaggctacagacgaaatgtaagattgctgaggattgacattcacaagtaatttttttaccagtgagaattaaaaattctatattatgatggaaatcaattttggtattaaaacaccacagtatgaagcataaatctgatgacattagctgaaacataagacatagatatgtttttccctgaccttagctataaaacaagacattgggtatgcattttcaaaggcttccttcttatctataaaaatacaccttcaattttgcagcaggcagacatatttgcaggcatacataatatattagaacttagagatctggggtggctgggtggctcaaaaagattttgtgcaaaccattagagccacatatcaaacaggatgtccttcctctttccaccaaggactaaggatttcagattaggcataactcttaaaagtgccttaaaaaggcttgaccttgttaagcttgttccgttcactgagatgagcttacttaaaagcagttaagaatagaaggacaaagagaatagaatgtatgtcagtcactgcaaattacaaacaatgcccatatacaggcattcacttgcagttgaattaatgtgatagaaaaacatttattatattatattataatttcaaattatagtagaatcaaagtagtaacatcactcaatttaattatggaaaaaaccagagaaatatgcatgtatcaatcaaaaaatgtggccaatttacaaacgaaaacaattttatctaaattttacttgtctttcctcaataatttataagtgtttaaaaaagatccccaatcagacggctgaaactgttttctcaactctgactagcctactatgtaggtagagcttctctgtgctctttctcaatgtaggatacaggaacttcagaagaggataagccatggctttcacggaggccttgatacctcacataagaggcaaaaatctcaagacactttgttttttttttaagacagggtttccctgtgtagccctggctgtctcagaattcatactgtagaccaggctgtcctggaactcatactgtagaccaggttggtcttgaactcaaagagatctgtggcctctctctgtcttctgagtgctgggattgattaacggtatgtgcccagctcttaagacatttaaagactgaaatcttgtgtaccttcaaagaagggaaaggaaatgagagctagtgaggctgtaagatgggggtggagtggaggagaaatggaaaacagtgaagtaaatggaaaagaaggttcttggtctcaggtgtgatgcctaagatctgaagtaatgatttcaattttaatccacttattaggaagggcactccgccccacacctgaaatttaacatactcagtttggctttgccacaaaacagcatgttaaaggtctctacattcaacaggatgcttacaaacatcattcatagtaaaatctatgtggaattgttggcaatacattgataataataatacattctgtaaaccatggcataccacattttacattatgcaaagagacaatatttacaagtctttaggagtttaaatattttatccactaacataagtgacaatttagcaaagtgcaggaggaaaccagtgctattaattgcattttctttaagagcagagtaaaaccatttctaaaagctaccaaaagcttatttgggtgtgtccagtaagggattacagagcattaaatagcctagaaaaatgatgcatatttagaaacagtgagtatgaaaatcataaggcagcatgctcagaacaaggtttttgttttgtttctttaaacaccagcactgatgtttttagtgttaacgataaatacgggtatatgtttgcatttatttaaaaattgagagtgcaaaacacaagcctcatttaataacaaaaaagatgtgcaaattttcttaaattaacacaaataaaagagtgagaagaatagtctactgttgtaaagaataaattgaacacagcgaaggagactgtctccattccaagatcatctacaaggcactaagggtaggaaatgacagataacacagaagagactgaagaaaactcctcagtcgggtcggaatatggggtattttggtaagaattctattagtattacctgtaaaataaagacagaaaagaatatattgacaagatatttttcatttaatgtacataacccacaaaatcttgttgagtaccacaggactgcattttcatcgtggattacagggagtgattgaaatgcaaaaaacagttattcaaagaattaggttatgaccaaacaggcctcttgtttccaaatcaaactggcagccaaccctacccactagaactaacagttgttattgcctgatttatgacagacatttgccaagaggcaaaccctattacagttttatatcccgtaccttttctttcagccaagaagaagaggttaaaactactttatatagattagaaaaaaatatttctgtttttgtgagacagggtctcaggtctcactatatagccctggctggcctggaacttgctatgtagatcaagctggccccacacttacccattcacctggcctctgtttctaagagctggatgaaaggtgcaagccacttctattattatgttcttctattattgttatgatgaaggcaggtctatgtacctcaggcaggccttgaccttgctatgaagtcaaagatgaccttgaacttctggattacaggcttagagtggtgctggggaccaaactgagggttctagatgctggacaagcacttttctgattgtactatgccctcagcccttggaatgtttaaatgataaacactggaagtttggaaggttcaggatgctgaacagatcatattgtttatatgtggttttatgctttgtgactaaggctacctattttctttcatatttgaaaagttttttgaggtggggtttcattatttagccctggctggcctgaaactcgcagggatgtgctcacccctgcttctcaagtgctgggataagaggtatgtaccaccgcacctagcaggatttagcctgtatcaaatctattttgatagattttactcattcaatagtttattcactccaagctaaatgccagccaaattaaaaaaaaaaaaaaaaaaaaagcaaaaagcagccagggatgtgagtccaaaactgagagtgaatccctacataagttttttgataagcttgcacctcagtggattttgctaggcagcagctgttcttactgccatatgttatatagtttgtgtctgaggtaacagaaatgaagggtatggaacattttcagctgagcacaggagctcagacttttcaaagatgtaaatgatctccaaactccggagatactttaggttggccacaaagcaaaagaaaatgaacggtggcctctgcaccccaactgacagaaatccgggctgagaagctaaaaggcacaattaacagacagcaagcacaaggcgtaaaaatccaaagaatgcaattaaaacagcttcatacttacatactccatcatattgctagtttcacatttccttttagtcagtttccagtgcagagcaagctaaaaaggtaagagttttggttaagaattcttctatctttggctaattatatttgaatatgtcactaaaagtacaatctaggctgcttgagataaaacagtacctcacaacccttatcaagaagacatactaatgggctggagagatggctcagtggttaagtacactgactgctcttctgaaggtcctgaattcaaatcccagcaaccacatggtggctcacagccatctttaatgggatccaatgtaatgaggtctgtctgactctgaagagagctattagatataataataaataaatcataaaaataaaaactaaaaaaaaaggaaaaaattcttttttttttttttttagatttatttattgattataggtaagtacactgtagctgtcttcagacactccagaagagggagtcagatctctttacggatggttgtgagccaccatgtggttgctgggatttgaactctggaccttcggaagagcagtcgggtgctcttacccactgagccatctcaccagcccggaaaaattctttttaaacaaagaaggcatactagtaactgaggaatagtccattagtcgattcctttgtggacttagtacttactttttcaatttgataatgcaaacatatgaacggagcacttacttgcctacatgtcttaccttgtggtataatctgttattttcccattctagtaacttctgaatcgatcttctggtctaagaaaaaggatcaagattctgtgataagaggagctgaagaacgttataagctacatgtgtctgtgtttttctgttttcttgtaaggtacaattaatttcttctctggtttttctattataaaccagagaaaaggcaatatatttgaaagaaattgtcaaaagcaaaataactctttgggtggttactatataggtagaaaaggagctctacctatccatccatctatccatcaatgaaactttaatttatgcttttccaaatgaaggacgcaaataaacggtatgtggctatgcactggactgctatgaaagttgagccacagtgctaacacacaacagcagcagttgtagacccagtacagttgttcataaacctttctcacaactactttttcaatacagatacagatacaggctgagttcctccaggcaaacccttttaagatgcaagtattttgtagggacttagaaaagtagagcttttaaaaccattctaagattaccaggaattttttattcttattagaaattttaataagtttctgattaaaaataaagaaaagccagatgtagcacacatctgtaaccccacctttagggaggtgaatccctgtgagttctgggccagtcaggagtcacagccacactgtgagatcctgcttcaatataaataaaaaggatggaagacaggaaggaaggactcaattgtaaaacaattaaaaagaaaaatcagtagaaaggtgaaagacctgtatttggttaggcttgtccacgctgtttcaatgcaacagagaaagaatatcctaaagtttgtatggaatcaccccccccacacacacacatatacaccctccacccctaccccaaccccatgacccaaagaaccaaaagaatcttgagaaagaatgaaggtagagatattacatatcctggtatgaaactatacttgaaaggataatcaaaacagtatgacactagtataaaaggcaggtatatggggctggaaagatggctcagcagttaagagcactgactactcttccagagaacctgggttcaatccacatggtggctcacaaccatctgtaatgggatctgatgccctcttctggtgtgtaggaatacaagccaacacagtgcccataatatataaaatactgaaagaaataaaatttgtatatgctaaagaaggatagatgtggtgtcctacacagtattaaaataagacagggcagaagactggggttcagtttttagtacctatattgggacgcttacaaccatttgtaattccttttttgggctccatgagtgctagcacacatgtacacacacacacacacacacacacacacacacacacacacacacacacacagaggcatgcacacaagcactcgtggaaaaataaaaacaaaacaaaagaacaaaagaaaatcaaacccctccacagatatatagacaaatagaacagaacggggagcataaaagtaaacccagccacatactcaactaaatttcaacaagatgagcaaacgtctacagtagggaaagaagggtaggttcttgaatggtgtcaggtagctggatatatgaagagtgaagttggccctagcttacatcatacaaaaattaactcagaatgaattaaaggtttaaatatcagcccacaacccataaaaattcttttaaaaatatcatctatctatctatctatctatctatctatctatctatctatctatctatctatctatctatctgatatgggattaatttccaaaacacataaagaaagcaacaaacgacaaaaacagcaaggaaccagtcctatagtggaggaggaaaaaggtctctaggcctttgccttaagctgctctaggcttttgtttcaggtcaagagggtaaggaaggaaccagccattttggaagtttggcgccttaattatgtagtcctggcccctctccctatctgtctgtctatcagggaatctgtctaattccgggtcctcaatacaatgatatatacatttgtaggacactctgaagccatctttttcatggtcagacagtgtttgctgagaccagcagaatcccggatgtgaggaagtggggggaagggtgagatatgcatttagtagggcaaggtagcacctttaatcccgccactccagcgggaggcagaggcaggaggatctatatagcaagttccaagacagccaagtctacacaatgagaacctatctcaaaataagtaataaagaaatgtgcataaatatctttccaccaggtaaggatggtatacacctttaatcccagaacctgaaggcagaggcaagaatttgaggccagcctggtctacatactgaattccaggacatccagggatacacagaaaaaccctgtttgaaaaaaaaacaaaacaacaaaacccaaaacattttaactttcctcagtgtttggttttgtttgttttgcttgtagtcacttcagttgttctgacacaaggtggtgctctaagtccaggtgtccactacagtctctgcagttctcaacttgtgacttgcgacccccaacactagatagcctgcatattagatatttacattgcaattcccaataatgccgaaattacagttctgaagtagcaacaaaagtaattttatggttggaggtcctatcatttaggaaggtggagaaccgctgatctagagctttataaagcaggagactggtaagggaggaaaatggcatgtttggcaacttgattaactaagggtgagtgcagccctccacggtagctaataaataatgaagccctactaaaaccatatcactcatcaaaccagatttgcatttatacacatgcactgaaaaggacagagggattttgccctctgtgatttttcaggtgctgtctaccatttttgttttgtttttttggtttttttttttttggggtggggggaagacagctgtttttctcactggtcggaaactcaccaagtgggctaggcagctccggtctttaatcccagcacgggagatgcagagggaggtggatctttgggagttcaaggccagcctggtatatagatcaagttccaggacaaggggctacttagtgaggcctttcatgtcttggggaagggagaagagaaaagattaatgaagctaaagctttactaacagagtaagaaaggagcagataaaagttagtaagtacttacaaaagtgatagaggggctagcagttttcatctcatggactagggaaggaatagtcttttttattagatattttcttcatttacatttcaaatgctatcccaaaagtcccctataccccccccccccccactgcccaacccacctactcctgcttcctggcccttgcattccctgtactggggcatataatctttgaaagaccaagggcctctcttcccactgatggccagctagaccatcctctgctacatatgcagctagagacacagctctgggggtactggttagttcacattgttgttccacctatagggttgcagacccctttagctccttgggtactttctctaactcctcttttttggatgtgagtacactgtagctgtacaaatagttgtgagccttcatgtggttgttggaaattgaatttttaggacctctgctcactcagttcctgctagctctggcctaaagatttatttattattatacataagtttactgtagctgatttcagatgcaccagaagagggtatcagatctcattatgggtgattatgagccaccatgtggttgctgggatttgaactcaggaccttcggaagagcagttagtgctcttacctgctaagccatttcgccagtccaggaaaggaatattcttaataactttttttttgcctgtagattgatcattagcatgagatggaataattatttgaaggagacaaaactcattcaaggagaagaagcaatctgaatgagtctatagcaagcaaattaaatcacgggctagagagaagcttagtggctaacattttctactctttttttttttttgtttttttgagacaaggtctcactatgcagccctatataggggaattatttccacagtacttaaatcaaataaagataatatacacaaatatacctgtaggacagtggtggtgcatgcctgtaatcccagcactcaggaggcagaggcaggtggatgtctatgagtttgatgccatcctggtccaagttagccaggactacacagagaaaccctgtttcaaataacaaaacctgtctcaaataacaaaacaaaacaacaacaaaaatcagccaaccaaccaactgggatttgaaaatcaatcagactagcaactttaaagaaaaactgtgcaatcataccaatatattcagggaaggcttttgatacaaagaaacacattcatgatgaaaaaccatgagtgaacccaaagtaggaaggaacttcttcaacttgataaataatatacaaaaagcatacagctaaatttatagctaagatcactcatgtgacagctgagggccatagccaatattcctattaaaaatcacagtgactggcatagctaatgtcatatgacacgaaagaaaagacagaaagaatggggcgtgtatttggttgttcaccgtcatgtaacagtttactatagagcaggtagcttatgaaaagcagattttactcagagttatgctggctagaacagtagtaaaagaaaaataactaaatctgagcgtagagggcaggagagatggctcagcggttaagagcactggctgctcttccagaggtcctgagttcaattcctagcaaccacatggtagctcacgaccatctgtaattggatctggtaccctcttctggtgtatctgaagacagaatactcaaacacatacaaataaataaatattttaaaaagaggggatagttaggcatggtggcacatgcttttaatcccagtatttggaaggcagagataggtaaatttctgtgagttacagaacagcctggtctacaaaatgagacaatatctcaaaaacaaaacaaaaacaaaagcccaaatagcaacccccaaaccaacagcaaaacaaacaacaaaaaactccaaacaaacagggtagagacatgagtagaaacctctacaaagaagatacacaaatggcaaataagcttgtgtgcttgtgtgcatgtgcacatgcacgcgcgtgcacagacacacacacacacacacacacacacacacaaatctgtccaatatcataagactttgtagaactggaaatcaaaccaacagtgaaatactgctgaacatgttttagaatgctcaagatctaaaatattggcaacaccaaatgctggggatgatgacctacacagaaatcctactcacttatgctaggaatgtggaatggtattgacaccgtagcagtttagcaatttccttcaaaacttcctgatcagccactgtgctttttaaagaggttgtgaaacatctggggaagaaggcatggcttgtgggggtgggtcactgaagtaatcctttgaaaggttttagccaggccacacttctgactggagttctctgctttctgattagccatgacttggatgagctacaaattcttgatgccacagacataatagtagcctgtctcgatggactatattcttgaaatcatgaaccaagctaaggcctttgttccctacgttgcatttgtcagatattctaccacagaacgtgaaaagcgaacaagacaatacttcactacaaaaatccgttctggatttgataaggagacatactgctttgctactactgtaataaaacaccatgatgaaggtaacttgaggagcttatttgggtttacagttccagaggattagactctgagatggcataaggaaggtgtggtagcaaggacaggatgctgagggctgacttgagggctaagcatgatacagagaactgggaatgaaagcttgaaggccacctcctgctgacatacttcctttagcaaagcctggtctctaaaacctgtccaaacagtgtcaccacctggggtccaagtattctaacatctggtcttatccggggatattaaaatttcaaaccacactaggaaaaaacaggaatgggagtgggcaatgaaagaatgccagattaaaaaaaaatagcaaagtagaaaaaaacaatcaaatctttccgtcttatgagctgaatctgttctctgaaaaaacaaatccacattgaaatcctgcccctcagtaccttggaaagtaaaagaatggaaggagatagttcagtacaaatgaggtcttacgggtgtactgtgccttgttgttggacaaagggtttcaggctatcatggcacttgctaggtagctgaggttggcatttatgtcctgatcttcctgcctctacctcctcactgctatgatcacaggcatgaggggtatgactggtatttttataggaagagaggattaaaaatcagacatgcagagagagagacttgtgaacatatagaaacaagactgtaaattaactgtccagaaagactcagaagagcaatcctattagagactatttattttgtcgtttttttagcaaaggatagggtcttactcactatgcactcctagtgtggcatttacttctgctgcatgtggatccagatgtagaactctcagctccttctcagcaccatgtctgcctgcacactaccatctttcctgccatgctgataatggacctgtaagccagccccaatgaaatgttttttttttttttttttttaagaggaagtcatggtgtctgttcacagcactagcaaccctaactaagacaggactcctagcttccagaactgtgaggaaatacattttagctggtcaagttacctaatctgtgctacattgttaccaaagcatcaggaaacgaatacattgttattagtcaccttaaaagtcaatagattaaactctcatttaaaatgtagatattttcagactggattaagaccatgacccatctattatattgtacatggcactaaattcagaactagggacacaaatagattgaaaacaaaaggacaagagctggcgaggtggctcagtggttaagagcacttgttactcttgcagaagacctgggttcagttcccagcacccacagggcagctcttaactgtctataactccagttccaggagatccaatgacttcttttaacccctgatagtaccagatatgcatgtggcatacatacaatcaggtaaaatactcatgaacataaaataaaataaacctaaaaaaattaaaaagaaaaggctacaaaaagatatttcatgacatattaagcaaaaagagactctggcagctatgctaattaatataggacacaatagacctataaaataaaaagaataaaaagaaaagaacatttaaatgaaaacgacagactacacacacacacacacaagttaatctgttcaggcagaataacaaaaatggcataccctgttttgtggtttctttttaaataatagccactgagtcagatgtggtggccctagcacttgggaggcagaggcaagtagatatctgtgagcttgaggctggcctggtctacatagcaagttccaggacagccagggctgttaacacaaagacatcctgactcaaaaaccaaaaccaaaaaaaaaaaaaaaaaaaaaaaaaccaaaaaaataaaaccccccaaaacaaaaaacctcaaccaaacaaaaaatgaaaccaaacaaacaaaaagctccagaaatttatgtggcttccaatttagtgttataagacttctgagtgtataaatgagtggagctttgattcttgtgccttcttttgggctgttttatttctgtttgtttgccttgtccaacttcgatgtgatagtttttgtttgttcttattgtattttattttgttatatatatttattatctcttagaagcctgttttttttctaatgagaaacagaaaaaaagtggatctggatatgaatggaggtggggaggagctgtgaaaaggagagggaggggaaccataatcaggatatattatatgagaaaagaacctattatccaggggctggtgagatggctcagtgggtaagagcacccgactgctcttccaaaggtctggagttcaaatcccagcaaccacatggtggctcacaaccatctgtaacaagatctgactccctcttctggagtgtctgaagacagctacagtatacttacatataataaataaataaatctttaaaaaaaaaaaaaagaacctattatccattttcaataaaaggaaaaaaaccccaagagttttatatatatacaaaaacaaggagagacagagatagtgatggaaaggcaaaggaggtagaggatgtgaagagaaaactctctctggccttttcatctaagggcaataatcccataaagacttcatctcttgtaaggttagaggactgcaacataatgaatttggtgaagatatataaacattcagtcactagcaatataagccgattgatgagaggataaatctatgaagaagacataatcattataaacatacatgcaatgatcaagaaactcaaaagtacgtttaaaaatgaactacactaaggtgaaaattaggtaattctatagtaacagagactttgatatactactttcagtaattgataaagcaactatgcagctcaatagagaaacccataaaggaagaaattaaacgccatactctgaagcaatgaacccacaagcaaacggagaatactgaatgaaagccgactattacatggtatatgtacagggcataaactaaagcagtccttggaaggaagcaaaactatgaatgacagtagtaagaaggctgctctcaaatcagtaaactgattcacaccttatggacctagtaaaaagaacaaattaaattaaaggcaaaaaagaaaaacaaataggagccgggcagtggtggtgcacgcctttaatcccagcacttgggaggcagaggcaggtggatttctgagttggaggccagcctggtctcagagtgagttccaggacagccagagaaaccctgtctcaaaaaaacaaaaaccaaaccaaaccaaaccaaaccaaaccaaaaaaacaaacctccgctggagaggtgactcagtgggtaagcgcactgactgctcttccagaggtcctgagttcaaatcccagcaaccacatggtgactcacaaccatctgtaatgagatctgatatcctcttctggtatatatgaagagaacaacagtatactcacatacatataataaataaatattaaaaatccacaacaacaagaccaaaaacaaacaaaaagataaaacaaaaaacccttatgaagtaaagcggttagccagtaaagctgaccagaaaataaatgggggaccgggagcatactcattagtctttaatattacttataaacacaaatatttcttaaatatggctatgaagagatagtggctaggctggatggtggttgctcatgctttgaatcccagcacttgggcaggagaggcagaagagtctctgagtttgaaaccagcctgaattacagagtgaattccaagataactagggttacacaaagaaacccttgaaaaggccagaaagccaaaaaagccaagaagaagaagaggaggaggaagaggaggaagcatgcacccaaagacctggattccattcccagtactgtataaactaggcatagcagcactatagtagtctatataatcctaccattcaggaaatagtggatgcaggactgaagttcaaggccatcttcacctacatagtgaattcaaggacagcctgggatatgaaacatggtctcaacaaacaaacacacatacgcatacacacacacacacacacacacacacacacacacacctcccaaaaggttcaaaggcaggctacatttaagttctaacattgtatggaatagtttcatgtcttcttagcacaagagcacacaatatattttgtgaaaggcacaaataaactgcttgaatacagctcacagatagaactttgtgtctttcacacaggcttattccttttctgtatgatatgatgtatccatagggctttcattttattctctttttaaaaaatacttaaattacgagctgaagagatggctcagtggttaagagcactggcaactcctccagaagacaagggttcaatttccagcacccacatggaagctcataactgtctgttactcccattccaggggatctgacaccttcaaccatcatgcaagcaaaatgaacataaaatgaaaataaatcattaaaaaaataaaaatgacaaataaaaattaaaaatacttaaaaaaaaaaacatagccaggcatggtggtgtacatgtttaatcccagcattcaggaggcagaagcaggcaggtatgagtttgaggcaaacctggtctacaaagtgaacacaggatagtcagggctacacagagataccctatcttgaaaagccacaaaaccaaaccaaaaccaacccaaatcaagcatgatggtgaactacaagttctgcttcataaaacacgggaatagtccatggcttctaaataactctctcaatttcacaagacccaaagttaaaaaggagaaaggtttacagtaatttcatatataagggtggtggcgtgaacaagcctgaaagctgaatatgaagccatagctgcttctatggttacatgcaagagccgtaagtcaaaactgactggacccacatgcctatgtagtggccacagttagctgtcattgaaatccagtcttctcagatctttaggttttatgagaaacaggctagatagcacaaatcttttgaacattacttaactaattagtgacgtgccaggggtaggatctggaacttcatacttgctgggcttcacaccactgatctgtggtttcaggactctaagtttttaaaaattatttattcattttgtgtatgtgagtacactgctgctgtcttcagacacagcagaagagggctttggatcccactacagatggctgtgagccttgaactcttccttcttagggctttcccctcaaatgctggcatcacagacatatgctatcatgcatggtttattcggtgccggagattgactttagggctttaggcatgcagtagagctttaaccccagcctgaactgtcatttcaaagatttttttgttttgttttgttttaaatatatgtatgtatgcatgtgtgggcacaaacatgtatgtgcatgcaagtggagatcggagtctacatgtgggagttggttctctcttctaccatatgggtctggagattgaactccagacttggcaggcttgtcaccaagtacctttcctagcggaaccaccctgctgtccctaggataaactctttagttaaaacaaagcaacaacagaaagaaggatatcagagaatcagcatcatctcagctttcactgactatcctattagaatactcagcacaaacacatgacttgaaagcacgtttctgtttcagtccctttggtgcagttattgagatggacaaagcataaataagtcacaggagagaaatatcttttttttctttttcttttttggttttttgagacagagtttctctgtatagccctggctgtcctggaactcactctgtagatcagggtggcctcgaattcagaaatccacttgcctctgcctcctgagtgctgggattaaaggcgtggagaaatatccttgataacattaaaacccaaaactttgtttcttagtgattgagactggctacactcaggatgggaaatccaaatcatgtaattcacattgaggttttaaaataacatcatggaagttagtgattataacttctaaaagatacaattaaaaaatgatgttgttatctcttttaacacttgtagaaagccagttgaaaatactatgcttgtattgacaagcaaattaaactatatttaaagcaaagctctgagctactggtggttattaaaggaatcagtagtctacttccaaaaagtcagagtggagcagcacctggtaacacacacctataatcccagttgcttaggagaccgaagcaaaaaacaaaacaaaaatcaaacaaacaaaaaacaaccatgagctcaaagccttcctgggctagagtctaagataagctcaggccaggtatgtagaagtgtgagggtatttttttccttaaaaatttatttatttctggggctggagagatggctcagcttccaaaggccctgagttcaaatcctagcaagcacatagtggctcacaaccatctgtaacaagatctgactccctcttctggagtgtctgaagacagctatagtgtacttagatatagtaaatctttttaaaaattgtatttcttgggctggagagatgggtcagtggttaagagcaccgactgctcttcttaaggtcctgagttcaaatcccagcaaccacatggtggctcacaaccatccgtaacgagatctgatgtccttttctggtgcatctgaagacagctacagtgtacttagatataataataaataaataaatcttttaaaaaattgtatttcttatgtatacagtgttctacctgcatgtatgcctgtgggccagaagagggcaccagaacccgttacagtcagtctcctgctgatggccagcaagcctcgtgacccttctgttttcacccaggcctagcttgtgacatgagtgctgggatttaagcgcacatgcttgtgcagagagggctgttacccatctctccagcccctttcatcacatttctttttcattactggaaactgaacatcactctatcactgatcccagcctgttaatcgtacttttcaaagatgtcctcccgaactggagaaaacagacctgaaataaaaatgaaattttaaagtagacaaaattgaggtagtgtcctaaattcatgacacaactagaaagaaatgttactatgacgtgttcaagggtaagagctttcttcacctttgaggattgctggtccttctggttggcttctgctgtagctcagaattattttaagtcatccttttgggttttcctttttttaaaaaagtaatccatatatatttgaatatataaattaaattgcatttattgaaaatggtgtaaactcatattaagtaataaactattggtaaaggctaaacaagtgactttctctttccataatttctttagcattaaaataaagacagcagtgttctgagagttaaataaatcatggaaacagttctaacacataataagtgttaataaatgtcagctctttttattttcatataataggctggttatacttactcttttgttgagacaaatcacgggccacaggctgcaccccagggtacagcagcagcagagacatccacacagcagccatttcacattgacagggagagcctttttcaagcatgagttcacacggccaatgctggtcttaaattcttctggagccacctaaaatagggggactctctttaaggatttgtgaacagctccccactacctctaatcctaaggaagacgccttatcccaaatatttcaatgtctcaatatagtctctccatacatctgtatcatatactcttggaagacttagcgagtaaagcaatacaatttcatggttcaagaacttcgcataatattcacaatgttctgaaatgaccaacaataaatggaaagcaacaggactgattggaatggaaacccatcaaacacttttgttagcaaacattcttgttaaggcaatggtgctcacagtcttcaggcaccctgactcaaagctgggctttggttagaagcgtaagataagactaaaacccaaacaactacccagaggaaatgcaattcaagcaggcattgataataatccccaattactttgaaataaactctcttaataccttttctttctggcaaatctgtaatataatagttaaaccggctattgtttgcattaacaaaaaagtggtatctggtttaaagctatctatcagtgttcagcccacataagactcataagtactccgagttttgaaggttgaaaaacccttcacacaaatttcatatttctagttaattacctctgttcctgaaatagttgcttgtgtttctctataaacaatgatagagcccactcaaaagcatgagtgtgacccatgtgagttaagatttgcaccaaaattcttcttgcaacttacataattcaaaggaacactaaaaatagtatgctttcagtaaaatcatatttctggattaacaagatgataccatgtcatttagaaaggagcagatggaaaactcatgtgaacaatttcagcatctggctataaaaataaaacttgtgatggtggtaaaaagataaattgctgtaaaatgaaagctacacaatgatgtgtgacatcacaaatctaaaagcttcactcttcacacatgtgtgtgttttacttttaacagggatgtcttagaattcacaaacataggtattaatggatgctataaagattcagttcagcactataactgtgaaaacattacgcagataagctttcctagaattgtggcacctgtaagttaattacttactccataaactggctattcttgctaacaatgaccagttttgaaactgtagaacttaaaatgtagtttatatagggaaaatgggctccactttccatctacactgctaacaatgtgatatactggcagtcattgggtaccaggaattccaattaagtaacatttctgggggttaatataaaaataaagtgagagtgtatgcaatggtgtcagcgtttggaggctgattatgggatggatccccggatatggcagtctctagatggtccatcatttcatctcagctccaaactttgtctctgtaactccttccatgggtatatgcctcagtacaggggaataccagagccaagaaggggagtgggtgggtaggggaggggggagggacttttgggatagcattggaaatgtaaatgcagaaaatacctaataaaaataataatgaaaaataaattgagagactcatgctataaaattgaaatgagaaaacattttaaagctaaatcagaagacttgcttctacttcatgccatgtctgggaaaaaccacagataatatcatttaatcttcttaaaaaagatttacttatttatgtagtgttctgcctgtatgtatgcctgtaggccagaagagggcaccagatctcactaaaaatgagtcgccgtatggttgctaggaattgaatttaggacctctggaagaacaactagtgctcttaactactgaaccattccccccccccctttttttttatcaagacagagtctgtgcagacttaactgtcctagaactctgtacaccagtcttgtccttgagtcaacagaaatctgcctgtctcagcattccaactgctgggattaaactgtgtatagtaccagctaaagtcaactcatttacttaattacaattcctcatatataaggtgaaatggcatagtttttgtttttaattaatttattgtattgtattaattaatatattttatgggtgagggttgtctgcatgtatccctgcaggccagaagagggcatcaggatcccattatatagatggccacgagccaccatgtggttgctgaggcttgaactcaagacctcttggagagcagccagtgctcttaaccattaagccatctttcctgccctgatataggcactggaaatcgaagttctaatttggaaggaatttcttatctagaatactttggaaaaaaagtgtaaatcacatctcagatgtagagatagaaaagtggttgcctgagttctctgatcagatgtgcatggagagcctcagttttcttacacatggattacaaataaaggataatctgcagcgtgttgagggaaacgtcaatgatcttcgggtcttgagtttctcagagctattctgtttccctgcttccttcctctccccttttttcagaaccagggctggaagccaggggctagcccatggtaagcaggtatcctaccggttattcctcctgcagtcctttgctgttcttttaaaaaaaacaaggtgccaagttactatgtaaagatttatgtgtcccaaacagaagcacttaacttccttttcattgcagggaatcaccaagtaacagttaaagatcgtttctatctagcaggactttctcagcacaagaccttctacctgagctaaggcctcgcagaatcccgggaggggccagacttctcaggcccctattctgtcctgactgcgtaacattggttcctcctatgaacaggctataatctctttccttttgctagaaaaaaaatctcgagaataaatgaggtaacaaccataaagctactttaggcactcagaaagtgcagctattgttcatatctcctggtaagactgcaggcaaaacaagagtattaattgcattctttaagcatttaagcactgttggcttaacaatgtgtatactttgaaaaaacaggaccatttacctcactgcctgggagtgcttatggaacagcatttcctactatcttatgctttattcctctcctctaaaaaaaaatctagtggatataactgtagtcactctatgatgcaggcaattctgtttttttttctttttaaagaacaaaattgatttcatattgtgacaataaattaaaaacaccatctctctctcagatgaatataattttatttcagaacggttattccgagaaggcttactcagattgtcaccttaagcttgcccctacaggccttttgtgttctcatggagtggcctgcaccagctagcgccatggaagcacatccaccccggtttggatgactggaactctggtgtcctcttcctcatccaaacctgacttccagctctatggtcagctaccactttgcagtacgaggagatgatctacagtgttgccttttttgagcttagcttatttagaaagtatctgttacacatatgtacttatttatctatctgtgtatgtgactacatcgtatgccctgcaggagtcagccactgtatggctctcaggacccagctcaggctgtctggcttgttggcaagaaccttttacctactgagccatcgtgccagccttgaaaggactttttaaaaaagtttgtgatcatgactggaacttttatttaaaagcagcatgaaagtacagatgagaaaattagaagaaagacatagaaacaaatctatccaaaagaacaaaaccgcgtataagggttctttaaaaaaaaagtttctttctagcagggaagaacagtgtagtagaaggctgagggaagggaaagctggcttgcagtctgaagcatgaatgaaagcaattataatagcacagtatatcctatatgtggttgattacatggttcagaaaatgaaaacaccaacacacctcaaatttgacacctttccgttttcaacactccgtgttttaacagatactctcttactactgacggactaaaactcaaaggttcaagttactacaaatgagaaatcaaattttgagtcataagagaagtatattgagaagaaaaactttcaccagaatcttaaacaagaaactacagtctgcactgactttaaaaagatgccaggactgggtttgggaaataaaaaccgtatttgagtaacagtataagtcataagacagacagggaacgagaatcaactaactcaactttaaacgtgtttggttaactatagattcgcggttattccaattggactcattcgcttctatacaactatttctagtattattggctaataatagtattggttaggagcctctgactttctagctggacagtaggttgtaaagaaacaaatttcattccttttgactctctcagaaataaaaaagaaaacaacatcaggaaggtgggggaaaggtcataatattttataacaggatgcaggagactctgcacagacaaaaactaaagcaaagcccagcaggactgatgtgcctccctcattgtgaggaacacaagcctatcaatcgtcatattggatcacaatgggggggtgtcagtttttatggctccccattgctaacactacacactgcttgccccataatgctctttgctgctttcaagctgagcaccagacactttcatttcctttggaaaacttaatgtgggtctttcactttctggtcaccagaatcttcctgtgcgtggataaacacactcatctacacgatttgtcctatcatgacagaactcactggtctgtactcacaagaattaacacaaaagaagcaaaaatggttaatagtgagttgtggagtttctgaaagggccttttaggttttcctaattcactgcatttttgtttacctcaaactggctacttagactacctcactcatgccaaaagactgatttttttttttaaataaagggtaactcttttctgttaggtattagaattatccattttacgacagtttacacaatgagtcttaagttggtaattaagaccttttaatttaattttttcatatttatggaaggcctccccttactacagaaatggtttaataatccacactaatctatactaatgaaacagtacctactgaagaaaacagattctcattaaggaaatcaaacttgaatttaggttataaacatgtaacttgaaaaatcagaccttcaggaaatagaaataaagcccagcggtagggtacatgcttagtgtgagcacggcactgggcttgatccccagcaacaaaacagacaccggatgctcagaatcggttttagtgcttgtctcattgttgaccacattttaagaaaatattgcactatcattctacattacctaatacatgagaaaatgcatatagtacaaactacacatacctgaatgtatatgaactataaaactaaccacctagccaggcgtagtggtgcacgtctttaatcccagcactggggaggcagaggcaggcggattcctgagttcaaggccagcctggtctacaaagtgagttccaggacagccagggctacacagagaaaccctgtctcgaaaccctccacccacccaaaacaaacaaacaaacaaacaaaaaacaactaatcaccagaagagaatacatgttttagccaggcatggtgactcatgcttgtaatcagaacaattagagagctgaggcaggaggactgccaaaagtttgagaccagcttgcattacaaaatgagttcgaggccagcttagagtacataacaaaactctgtttccaaaaaagaaaggagggcagatttaaatggaggaagaggaggagggagggatattgtcaagaacagcttccatccagatcatctaggtagtatgaatggttatcaaaagcagcttaccattcttacaactccaatttaaaaacatcctagtatcttttgtgtcaattgaaatttttagttgcagaaaaattggaaaggaatgaagaggtgtgaaaaaatattcaaaagattacttcagcacaaaaaaatggctaattaaaaagtggctaacgtgtatgcctgggagctatatttgctgacagtttagcagatattcattttctaaagctataattttaaatatgtaagaacaattaagtaagtattcaagctgcatataattccccagtcaaaacatgcagtagcattaatggaaataaattctctattggagattttttttttgttattgttgttgtttttgcttttttgagacagggtttctctgtgtatccctggctgtcctggaactcactctgtacaccaggctggccttgaactcagaaatccacctgcctctgcctcccaagtgctgggattaaaggcatgtgccaccacggcctggctgtttgtttatattttgagacaagttctaactatgtaacccagactaagtctggaacccatgatccttttgaatgctagtgctgggtttacagacctatgtcattgcaatagctcaacgtgatattttaatatacatatgcacgcctagtgaaataattactatagtcaagcaagttaacatatctccttacgtagttatttatcatttcttttagagaacctgaaatctgttcatttggtgaattttcagcatataatacaatattatttataaccatcacacagtacattaacctagacttatgtttgagtcctgggaagtctgaaatttgagcatgaatgcttctctatacaactgattatcgggaaacccagaaatagaaaggtagttacttattggtgtgaatccaattttagaaactcaagctaaaaggaagaaaaacatgtaaccaaaaatatgatgctttttatttgtaataaatgatgcataccatataacacttttaaaaaataatagtgactcagttaaaaagatagctttggcaatgaaagattggaaattatagatctaaatgaaaacaattacagctacctgcgctgggcaaaaaaggcaacactggaaaagctgagcaggtaaataaacaatggctgacattaaggaagaacagacgaaatagctggccagaggctggtagtcatggaaacaccatttagtcactgcacacagcttccaagcagggaggccgcctgttatttggcttcattaccagtgagtcaaagcatttgtcataacattgaataaaccataacacagtgcattagaattggaaaattcaaagcaagcccacttaccttccctgtcagaactgacggaaattcggtatcaaacttgttgctcaatccaaaccttaaaaacaaagacagaacaatatctattctattcagcatatttaaccctttctcacagtaagttataaaacccatgaggttttcttttggtcttcagactcagacaattgtgtcctgaatattcacaactttatgatgtatgtgccagttaaaaccaaacaatggattaaaaatgcatacgcaagtcctaaaaataacattacatttttaaaaatccattaaatccaacagatatgttctgaataaaactttacaggcagatatctgagttcaaggccagcctggtctacagagtgagttcctggatggccagcgtgacacagagaaaccctgtcttgaaagactaaaaaccaaaaccaaacaaacaaaaaagctgggcgtggtggtgcactaggtgtttattcccagcacttgggaggcagaggcaggtggatctctttgagttcgacgccagcctggtctacagagggagttctaggacagccagggttgcagagaaaccctgtctcgaacaacaaaccaacaaaaaccaaaactaaacaaaaactacagaaagtaaaactatacttcctttttcttttcttctttttctttgcttttttttgtttttgttttttttttttttttttttttttnnnnnnnnnnnnnnnnnnnnnnnnnnnnnnnnnnnnnnnnnnnnnnnnnnnnnnnnnnnnnnnnnnnnnnnnnnnnnnnnnnnnnnnnnnnnnnnnnnnnnnnnnnnnnnnnnnnnnnnnnnnnnnnnnnnnnnnnnnnnnnnnnnnnnnnnnnnnnnnnnnnnnnnnnnnnnnnnnnnnnnnnnnnnnnnnnnnnnnnnnnnnnnnnnnnnnnnnnnnnnnnnnnnnnnnnnnnnnnnnnnnnnnnnnnnnnnnnnnnnnnnnnnnnnnnnnnnnnnnnnnnnnnnnnnnnnnnnnnnnnnnnnnnnnnnnnnnnnnnnnnnnnnnnnnnnnnnnnnnnnnnnnnnnnnnnnnnnnnnnnnnnnnnnnnnnnnnnnnnnnnnnnnnnnnnnnnnnnnnnnnnnnnnnnnnnnnnnnnnnnnnnnnnnnnnnnnnnnnnnnnnnnnnnnnnnnnnnnnnnnnnnnnnnnnnnnnnnnnnnnnnnnnnnnnnnnnnnnnnnnnnnnnnnnnnnnnnnnnnnnnnnnnnnnnnnnnnnnnnnnnnnnnnnnnnnnnnnnnnnnnnnnnnnnnnnnnnnnnnnnnnnnnnnnnnnccagggctacacagagaaaccctgtctcgtacttgtaagaaacaaaaccaaaaccaaacaaacaaacaaacaaacctgattttatgagaaacatatagacatctgtgtctgtgggagattggctctgagccagacattggatatcaaaattcctggatagtcaagtcccttatgttattttttattggaaattttatatttatttgattttattttatgtatattttgcctgcatgtatgatgtgtgccatgtgtatccctaatgaccttggaggtcagagaagggcatcagacctcctagagctagagttagtgatggtcatgagcattcacttgagtcccgggagctgaaggtgaacggcattctgaatcactactttctgaaatctaggtaggaaactctatagtactaggggaaagtcctctgtaagggcaacaagtgctcttaaccgctgagccatctctgcagcccccagttccttatattaaaatggcatagtgtttgcatctaacccatatacatccttctgtattctagattatcctagtaatagctaaaacagctgctatgcaaatcattgctatgctgtgttgtttatagaataatgctaagagaaagtctatccctgatcaatgtagatggtgatttgtttcagatatttttgatctgcaaatggttggatttgtgcaaaacctgttagtgtgataccataacatataaagaagatggcagagtagcacatgtctataatcccaggatgaggcaagagatagtgagttcaaggccaacctgggctacatagtgagttcaaggtcgacctggacaatatattaagaattcatcttaaaaataaaacaacagggggttggagagatggttcagtggttaagagcactgactgttcttccaaaggtcctgagttcaaatcccatcaaccacgtggtggctcacacccatccgtaatgagatctgatgctcccttctggtgtgtctgaagacagctacagtgtacttacataaaataaataaataaatcttaaaaaaaatcaacaaagcatactgaaaagcaaacctgacccattactctcataattttggctaacaaggaatagctatcctcttctcacttaccagggatttctttttctttttcttttttgttaacattgaggacataaaaagggtgcttacttcaaatagccttaattctgaggctttcacttagtagctacaaatataatattaaaatagctgctggtgaatgaataagttttctctgtttcataagcgaactatgaagttaagaactacggctacacagaaattgcacaaatgcatctattcattactctaagccaagatgtggcagtcttcagcattagacaaagaggcacttgggaactattcataaagtcattttattgatgttattaaatatagagtctattatgtgtttgaagttgaccaagctggtggttgtcaaagattgaattctctttaagtgttttcaatgccttttaatttcttgaaacaattctttggatgataggaaatggaggcaaagaaggatgcatcctaccctgcctctctatagccctggctttccatccttgtgaagacgactattttcaatcatttaaaccttgcataaatgaatgttcatgtgctcaggttaagagtcaatacatataaagtcctgtaacaagagccacaattttgctagaaaactatatacttcataagactgattctaaactacatgtagtgtactctactgtacttaggaaaaggaaaattataccctataatacagaggtttttttcagttttgttttgtttttagattctacttagatttccttaatctttctcatcagactacaaaatggcttaaagccttgtaaaatagttacctgattgttttcagtgttggggactgagccggggccttgctcatactaaccaaggcctctctctgagtccataaagttatactatcagtatatcactgtagtctttcaatgacaggtaacaaaatggtaggccattctctaatccgagaagtatctctaaatttgtttagaaacctgctgtttgtaaatttaaccatctgttttggttctatatctaatgagactccctaaaaaacagtaattcagcaattatctcaactaaattacacgtactctagcaagggcagacttatgcacattttaagtaataagtatgatcatattttaaaacacaaggggaaaaatatctgatcagatgtatgttttctgtattttaatacaccatgccccgatatttatcctaaaaaagaaaagtataagtcacataaacaacatttttgaaacatttcatacttgcaagtgacattcatcattttgtttctttagtatcaaacctgtggaagttaatttagtaattttttttagacagggtctcactatatagaccaggctgggctctaacagctataaacatctgcctttgcctcctgtgctatgaccaaagggacgccccaccacatcccagtttcactttagactatcaatatgtcactgtaatctttcaatgataggtaacaaaatggtaggccattctctaatccgagaagtgtctctaaatttgtttagaaaggtactgtttgtaaatttaaccatctgttttagagagtgtcattaatttcatgttaaaattcatattttgttaaaataactagaaagccaaaaacatgaagatgatacaagtaaactggagttctctgacccacaggaaaacttaacaaagctttatagaggagagggatggtgatgtgaggatccctcatcactaggattctgatagtatcacagctatgtgaagtcctcttcctagcatgattcaacaaactagcatttgttgagggcctgtaataaatctgacaaacagacatagactatcactaaaatgaactaatagtcattgaatgtacttaaacggggactatgataggcactgaagattcatagggaataaaagattgttcttgctgttgtagcttacaatttagtgatggcaaagaagactgacagaaaatggtgacatttggataattaaggtgaggggaggtgtggattggcatttcaaatggaggcactagcttgaacagacataagataagaaatagcaggctgggttggtgacatggctcagcggttaagagcactgactgctcttccagaagtcctgagttcaattcccagcaaccacatggtggctcacaaccatctgtaatggggtttgatgtcctcttctggtgtgtcggaagacagctacggtgtactcataataaataaataaatcttcaaaaaaggatatagcaggttatgataagtagcatccaagcaacaaaggaaatagaaaaagatgacagagacaggttagatccagttttggatgccatgttccagagcttggactctatcctgacaaggaaggagaaactagactaagcttaatcaggacagcagttcatttagctctgtacttttggtattttaatcaagtaacaggctgaaggacagatgttagcgtgacaaggatagaggtaagacaactagttagggtagaaaaagaggcctgaatcggagaagtggcactggagaagaatataagcaaatctaagtcctatatcaatcattttttgatgcttcactttgggaaacatgagaagaaaagggaggtaacaagagatacacactcaactgaaacggagaataaagaacaaaaaggcacatgagagtgaagtagtccaggtaaaagcctcagtagtgtctggtacagagatacacatttggaaacactggattactagatcacaagaagcaagaagagaccatttaagatgtgtagacagtaaaagtagaggactaagcacaaaatcctgaagatcactggtatttaagaagcaagaaaggaagaagactgtgaatgaaaaatatacaccgggcaagcactctattataaaactatacatactaccaatgtctgatcatagtgatctcgattgaggccagattcttcacagttaaggtggcagaacccagccgagaggaagtatctatggcatatgtatgtactttaaagaaatttggtgaagagagattagagggcaggtaaaagggatgtgggtatcagaaggtttttgtcatagaaggattgaataaaattacaggacaatctagactagattctaaggagaatcaaagtaaagcactattggagccaggggctaacacggaacaaagaccttgggtggaggctagaagagaagggtatgaaaagcagaagagatgagttttaggtaaggaactccttgaattgcaatgttgggaaaactcagatctaataaagagccaatgcagatttgtagctgtacaggacacgattaaatggaattttaagaaaattagtttggcacaagcatacacaatgaagcggggagaggcagcaggctgtgcctataattcaagaaggggatggcaactcaagcaagagtattgccaaataggaatagagaaaatgaaaaatcttaacaaatttccaaatatatgatgatacaattctgggaaaactggatatagggcaattcaaggagaagaatcaaaatgactcaaagatttcagatattaccctgggagagtagaattttggtgttaccactataaatgtggcaactagaaatacaacccatttggggggaaaaatgttagccgggtgtggtggcgcacacctttgatcccagcactcgggaggcagaggcaggtggatttctgagtttgaggccagcctggtctacaaagtgagttccagaacagccagggctatacagagaaaccctgtctcaaaaacaaaacaaaacaaaacaaaacaaaacaaaacaaaatgttgagtgtaagatacactgagttacaatcaggttaaacatactatcttaaatatttatctcctagtcatggtaaaaagctacaaaatacttccgtcttttttaaaaatccagttgatggcaacacctcaatttttaaactttgaatagaagcaaatcttctatagatgaagactgaacagaggatagaaaaaggccagtatacaggagaagaagaaatagttcactcacattggtacagggccagggttgtagctcagagatacagcatttgcctggatgcacaatgctgtagtttgagtttcatcaccacaaaaccaaagaaaaccaatataacatatagtttagggtaatcaacacatgcctatgccagaaaaaaaatgaaacaaaaattggtattttagatgtattagtttaagattatttgttaaggattttgcttcatttgacagatgggatgttctgttattatagttcatgtttctgataccaaacaaacattttactaacaacagggtctcactctgtagcccatgccggcctggaactcatgtgttccagtttggccttgaactcatgacactctccctgttttaatctaccaaatgatggtatcacaggcttcaccatgtctggcttctaaacatttaatcttcttcttaaaaatgttagatatttagcattaaatgttcttcctaaatgagaaaatgtgtacaataaagctaaacaattttcatgtttagtaatttaagactggcttacacttttcagagttttcttcaaataattaacactaagatgctattagtgccattcctttacacctaactccagaattttaaaactgtgtgtgtgtgtgtgtgtgtgtgtgtgtgtgtgtggtgatagcagaaaattatacctataagaggctagccacagcaaacctcagagctctgttttaaatgagaacaaggaaattggttgtgtggaaaatagaatggagccacaaagaagttttagagaacttaaattatgcttccttgctatgtaatcattgcttgaattgtagaaaataatggggggagttggaagataaaattatgggtcaggatagaaaataccttttctttgtctagtcatggaaaattatctgcataaaaagtctggaaaacgagacagcaagtgtggtgggcatgatagtattttagaatttcatggaatgaaaaacaaaacaaaacaaaacaaaaaagaagcctggataccagaatcataattagtttgaataatggtctccctagtgacaaaagaaatggaaggaaaatggtgcaggaagttggcacctgaacattacaggttatctgcaaaaatcttggactaagaaaaaaaactgtcttcaaattacctaataaaaaataaggcccaaaagtcacctccaaagccttccacaattgacaaacatttggtaatacatacattcaatgatttaaaaggtgtattacagtcaaaatagttaacatgttaaaaattaagagatagcgtacacactggatgatttcgtactagcactcaattgagtcaaagggactatgtgagccatgataaaaattaaagagagtgtgacttgataggaaggcgcaaatatagtttgaaaatgcagtaaaagacaccacagtcaagagcatgaacacgacaccatattcaaactctcaagtatgtgcaatccaagcaataaaaatgaggaagcactcttcaaagcccagtgatcaatttttttcttactgtgcaacaaagatgataagaagtccttgcacactttatttccttaaatatgacataggattcaatgtaaaagaagtcatctgggttgagttttaaagaaattaaactcaattcattaagggctaatttctatatacttaatatacttaatatttgtatatttaatgtctggacatacacgattccctgtagacatcttaaattatttcagagccaaagggggttagaaaccacgcactcagaacccttcattttggagatgaggaacccaaggcctggaagtaagaatcaactgaccaaggtcacagtgccagtaagaagggaaactgagatttagcaaccaagatctctcactctgtatccattgctctttctactttgcataggttcctattaacctgaaactctaaggatatgatattaaaggaacgtcagagtagtgcgttcaacagagaaaggatgacgatattcattcattaggtaggaagaatggatggacaaatatgtgggtggatgaatacttatattattcacaaaatgcatcacatttttgttttgttttgtttttgaagaacccaaacctagatcatgtcacctgccacagcagtcgccgttttccactagccatcaatcttggcagcagagaagtctagtacatcctgcagtttagagactattcacttgccagcgcacgaacgagcagatcgcccctacttcagtctctctggctccctaccctgcaactccatgtcctatgctcactctttcctcagggtcgatgcagcgttatctcccacccccttcttttacacgatacctattcaacctgcggttttgccattttgaccaggtgccctttgctaagagtacgctttagtcagccctccccccactccgcaggcccctcaatgcccttctcattcggtttgtcgtcaaatctcagcctctgcaagcccccgaccccaatcgcttacacagtgatgtggccggcgccgcgcaccaacacagggtctggggcatatctccgcagatgctcctcgctcactacccgaggcgggggcggcacctcctcctcctcttcttcctcgtcctcctcctcttcatcctcctcttcttcctcctcctcatcttcctcgtcctcatcgggcccagataccgacgacgacgacgacgacgacggagacgacgatggagacgacgacgatgttgctgcctcttcttcttcctccaattccgagatggtgtcgaactccgccatgttgggcagcaggatgctcatcacgtgaccgcacgatagccgccactctcccggagaagagtttgaacctgcggagctgctgggagaggagggggaacagactgaagagaaagaggagggggcggggaaagcgcttgaggagacgcgcctgcgtgttgggtagatggcgcgggggttggaggcgggggcatgagggaccagggagtaaattcggtgtacgcttgcgcgcctccaaggggagggggccggtagaggtgaactccagggaattctcgaggtccggtctgcgggtgctgatcttcatactgcgtttcggacgtcagtctcttgtacacaggggacgttctcgttttagtgtctgttaattaatgcgggatatatttgcctttatgcagacagttgaggtaaagcaaattctataaaagagagtttaggacattgcccaaaatatctcaaggtacgcatatgtcattcccttacgcagagattgttcaattctgagaaaagggtaaacatttttcaaaggaggaaactttctattaatttcttacgttgaatggtactttgcggacttgctaagcatcatagactgtgctaagtgctctgtgtacttatctcatttaatctccccacaaccctatgaggggtgtaccacattgagtctcatatcacacaagggcaatctatatacaaagagaataaataatttgtccaaagacatggaactaataaatgacaatgagcttttaaatccagagtctcgtctgactcccaaagctctgttcttttagccaaacagccatggtgcctaaagttgattggaaagaatgggcgaagtggtgcattttggttggttcttataaataaggatacacaggtttgcaatgggtgttctgaagccggcatagtggcacatacctctaagcccagcatttgggaggcagaagcaggagaatcttttgagcctagcttacagagctcattctaggacagctagggttacaaagagaaaaagagaaacccttctgggaagggagggagggagggagagagggagggagaaagagagagagagagagagagagagagagagaagggagagagagagagagagagagagagactggggttggagaagaggagctgtagagtgtgcagcagagggtatgccagtttagagacacattaattaacgtcacccattctatagattccaagctgtattctttcaaataccatagctcatgtaattcaaacactcttgtgaggtaggcatctttatatgtcttttatagatgaagaactgatgggctggagagatggctcatcagaagcactggcttttccagaggggcctggttcaattcccagcacccacatgcctgctcacaagtgtctgtaactccagtttctccagggatctgacacccttacataggcatacctgtaggcaaaacactgatgtacatgaagttaaaaaaatcattaaaaaagaggaagagttgaatatcagaaaatttaaacaattcattcaggtcggtagtgacttgctctcttttttttcccattcaaacattctacctcatctttacattgctaaaatacatagattacctattttgagttactaggtaatgcaccaactggttcatatctgtcagtggcaccgaattttgcaattaagactataaagttgtgcagctcctctgtaatagaataaatattgaggtcctctatactaataccagcttttcttctccttcagatgtagtagagcatccattctgacagaactgggggtttagaatgagcctggtatcagcagaatagtggtaataagcaaaatatttgggcatatgaggaggggagtaatctgttataagagagattgttcaaaatatcaaggaattggcgttattaatattaaatgtttccactatattcaatagcttggctattttggaattgaaaagtaagctgtaacattttctataaggaataaatgtagcattttgttgcataaagagcttttctttagctagagattaggataaaagaaagaatcttaaaatattccataataattgttggctttcctggtgctttgaaacatatatcaacagcaagattgaatgaccttagacccaaggaggaaaatatttcccaaatatcttatgtataaagaaagagtttagtatatcaatatttagagggaatagtagtatttggctaattactgccttttttttttactgcttaattactagcttctgtttttatcactcaaaattagtctaggaaggaatttttgacagaaagggaaaggagtaagatatggattttgtgatgaatgcaaaaagtcattggaactattgtaaaagtaggagatagtggctaagggagaccgaaaggaagacggaaaagaagggtagggcaaatgctactatatgctgcaaagtagagagtcccgaaatgtagttcagttggtagagtgcttgcttatcatgtaggaaatccctagttctaatctccagcacagcataaactgggaatggtggtgcacatttgtaatcccagaagcagggaggaggaggcaggaagatcagaagttcaagttgatccttggctatatagtaagcaggtcagtctaggacactgagacactatctcaaacaaagtaaaacaaactaaataatttggaaagaggccgctgacatttagtcagaagtcaaaaggacaaagtagtttagaggcgtgttacacttggccaagtgtgcaagcacagtcagatcagctcatctgtttccctgcatgtacactgtgctgaagaagcatatgtggttacaaaggcaatcagttgcactgaacgacaggaggagtcttagattgggaaagcacaggaaaacacgttttgtgtatccactgtcagtgactacatgaagcatgatgatttttaaatgataagttagctttcaggatagtaaattggggaatggatagggaggaaagcaggtggaaaaaggttttgtttgcctaacgtgctaagaaggtcatgagggtcattctctcggctaatagatggctgactgaggcacaaagtctcaggtttaatggtctgagagggttttaaaagatagtgttgtttgttaaagtatgcatgttagtgatattagtcaatttacagaatggtgcagtcatcatcagaaactaattttagaatatttccattgcctcgtttttcaatagcccctgccccaattctcatccccgatcctatgcaacaattagtctgtgttatgagttagtatttctttagcagggcttttcaaataaactatattataaaatacattgcttctgacaccttttgcttagtgtgtcctctaggttcttcatattgtgtcatttattagagcttcattccttttaatggataaatagtattttattgttgcagtagatcatatttttcttatccactcacctggtaatgacatttggattcctttcatcatttatatattatgtaaatactgttgtggacattcatatgtctctgtaaaacatgatttaattgttttcttgaatagatgtgtataagtggaattctgggccatctgcttaagactgtgttgaactttggggttggagagatggctcagaggttaagagcacatactgctcttgcgtaagatctgaatttggttcccaacacccattatttgggcagtacacagcctgtaacctcaacttcagcaaattacatgcctctagcctctgcgggcacctgtacacatctgaacacacacaattaatgataaagtaaaaggatttgtttttacaaagattgtgttaaacataataaagctgttgaaggattttttccatactggctctatcagttgacattctcatgaagtattctctggttatttatttatttttttgatcatagcttctctgtcttttaaatgatttattataacaagtcaattgccaccaccatttataaatatgaacgaggtgtttattaacaattttgtttactgttccttctttgttactgatagtgtaagagatttgtctttcctatttagtctttgctccatcttctcttctcttctcttctcttctcttctcttctcttctcttctcttctcttctcttctctctctctctctctctctctccctccccccctctctctctgttttaccatgctgggaatggaaaccagggccctgcacaccctgggagaagtgcaaaccctaggagaagtgcatacactgggaggggtgcccagacactgtgccactccttccccaacccttgtacttgttcttcagaattgttggcaataaattaccttacttttcctggtctgacaaaatgttgatcttactttcgttcctgaaatgtcttttttttttttaaagattttatttattattttatgtaactatatggtagctgtctttacaaacaccaaaagagggcgtcatatcttactacagatggttgtgagccaccatgtagttgctgggatttgaactcaggacttcaggagagcagtcagtgctcttagcggctgagccatctcatcagccccctgaaatgtctttttactgggtgtttaattctggactgacaatagtttcagcacttgaaaaagaccatgccatttgcttcatgtgtccagatgtttagttaaagaacaatctcttgcttttgagttgtcagtgatattttgtttattcattggatgcattaaatatttttctttgttgttaatatttgaaaatgaaattattatgtagtgtggtgtggatttatttgtcctaatttgaggctcctcctctacctcctttttctcttttctttctttcttttcttttctttttttttttgtttttgtttttgtttttttgttgttgttgtttttctgagacagggtttctctgtatagccctggctgtcctggaactcactttgtagaccaggctggactcgaactcagaaatcagcctgcctctgcctcccgagtgctgggattaaaggtgtgcaccaccacgtccggctttttttctcttttcttgagacagagtctgtctatgtagctctggctggcctggaacttactgtgtgaaccaggctggcctagggcttgcagatatccacatgcctctaccttcagaatgttgagattcaaatcctgtagcaacatacccagtttcatgagttgttttcaagtaattgcgggtattctcatattaccttatgagagcctggattctctttcagctttctcttttgactgaagtctgctggctttgctcccttagggaaaggtgagctgctgtatctttatgtgttgccctgttggaggagaaagtccactttccccattgacttgattaacactcagacaggggtccttggtgctgctggatgaggtaagtatttgggcttatgtcatttgcactaaccctgaagattcctgggtgtgtgtttggcctactttttcaccagtgtgttgttgttttgtaacttcagaagtatggaagacaaagcaacaagtttggccttgctgtgaagatgaaggcagaactagagttcttttctatggtgttaacacttactatatagataatttgaccatctaaagggtttccagttagctgtttccagttttccttttctagttctttggctagaaagagctgagctgggactaaatttatatctgtctcaactactcttgctgtggttctggcttcttcaaacccaagactggggtagatgaggcaataagaaatcccggtgaggaagagggcttagaatcctcaatgatgtagccccaggtaagttttccttgctcaaataaataagccccacgcacattcatgtaagcagtctaattaaaagcagcaggttacacacatgtacacacacacacacacacacacagacaaaaggagaggagacgtttgttgggaagaaggggttcagtggtaataacagagcaatggggtgactatgatcaatattatctcactacgtagccctgacttacctgaaactcactgtgtaaagcagtcttttgaactcagagatctacatgcttctatcttctgagtgctgggattaaagtcatgcacagccacgtctgtccaaaaattatgggtttgatttgttttctaactccctaaaatagaaatctgtgactgattttttaaacagataatatcattttattttagagcaaacaatctaatattgtttagtataatcacaaatgtttgaaaccataacactctctaatgccacaacatgattatcaccccattaatgcccatgcccgctccacctctcctgtcagccgctgggaaccagaaatctactacactgtgtttcagtggatttgtgtgtcctggacagtttatagaaatagaatgacacacaggatgaagtatttctgttgggcttgttttgtgtgacacatgcttttaagattcaaaaatttgctagcatgttgttctttgaatggctgaataaaattatggttatgaataacccacattttgtttgcattcttcaattggtgactattaggttgcatctggttttccctattatgaataagaacaggaacaatacaactactgggaataatgcagcttttagtattccatacaagcacttatgagcgtgtatttgcaagtttcttacaggttacacacaagaaaaatttgccaggtctcatagaaaacctatgcatttttctctaagaagcaaagcaaccaatcttttctccataattgtacctgtctaacagctgtgtccaaagatgctagtgttccagtttcatcctcaatagttgctgttgtctgtcttattcattttgttaggtatcctgtatttagtccttattgcatcatgtatacaatggcatttcatccttctttagattttcatttccctgttgaataactaaatggaagatcctttctgtttttgaaaattatacctctctctctctctctgtctctctctctgtctctctctctctctgtgtgtgtgcgtgtgtgtctgtctgtgtgtgtgtgcttaagtgcgccacagtgtgcttgtggagatcagggagtgacttgtaggagtttgtctctcctttctgggggccaaactaagatcatcaagcttggcagcaagcacctttatccagtgagtcctcttgttggcccatttgtgtgtgtgtgtggtttgttgttgttgtttgagacagggtctcactatggagctctggctgtcctggaactatgtataccaggctggtcttgaacttacaagagatctgcctgtttctacgtcccaagctctaggattaaaggcatgaaccaccactgcctcctggtttactttattctgggggctctctctggtttgcaaatggttgctttctctgtatactcacaagtgggttcctctgtgttcacacacatttcatgactatcttcagttatttgttgtgttatagaagtagaggtggcaagaaagagggtatgcataggtttgatcagctttggggctgagttagaggtattgacatgtgtgcagctgtgtgggccagggctggcattatgcagtactctgcctgcagaagtcagccttggctgcatggattattgggcttggatccttctgtaccttgtggatgtttgaaggcacaggtgcagggttgcactggctctctggaccaaagcacccatggaggcagcagctaggctagcagtatctataagggtaagtgatttaggcatctagaaaatgagcccataggataggattgatcctgtggcagcaaaattatggcagaaataatagcttaagtggatttggggagagagataaaagaggaagttacaaagcatcattgggatagaggaatcactgcagctgctttggggcttgctaatcacaggaacagcaggtcactggctctgggtgactcctgtacttagaaacaaagacagaagagacttgacccaaagtgcagctgtggtggcagttgatagcttccgtgatagtagctgcaggcacaaggatctcaaagtctgtccacatgttttctattgctttcagtttcagtgatttctcttttctcttttccttccttccttccaaactggggatcgaacccagggccttgggtttggtaggcaagagctctaccactgggctacagcctcagcacaaagtataaggggtttgtctctctctttttgttcccagtgatttcttaaattttccttttcagtcttttctttctgctgtttgctttaggtttaatttccttaccctctccaggttgttatgatggacctttaatttgttcccctcaaatcttccttcttttgttgtatagacatttaatcctataattatctcttcaaaattcagctccagcacactgctgatgtgctgtaccttttattttcggttagttaaaacatgttaatttctcttgagacttgtgtgacccataggttatttaaaactatgttgtagagtttctaaatacttccaaattaccgactctctctttatgatttagattatgtttttggagtatgaacatagatttcacataatttctgctgctttctcaaattttattaagatatattttagagcccacatatgacacatcttagtaaatgttctctttgtgcctttcaaagcacgtgtattttgctgtggttggactcagtggttcttcaatggtaattttattatgttgattaagactactatctaatcccagcactcgggaggcagaggcaggcggatttctgagttcgaggccagcctggtctacaaagtgagtcccaggacagccagggctatacagagaaactctgtctccaaaaaccaaaaaccaaaaaaaaaaaaaaaaaaaaaaagactactatctatccaggtgttgtggagcacacctttaatcactttaagcacttcggagggagaggcaagtggatttctgtgaattcgaagccaacctggtcttcagagggagttccaagacagccaaggctactcacagaaaccttgtccagaacacacacacagagacagagagagacagagacagaagagagagagagagagagagagagagagagagaactctctttgttaccgacaggaatgtgttctctctagactacaaaactggctttgtttccttttcatttccagcagtttatcttctttggagattctttaagattccttagttattttgtaatgctattcttcatctctgataatctttgttttattttttgcctggccccgaggatgaagcccagggccttattcatgctagtcaggtgagtgctttgtactgtgcacacctcctgctctagtctgctttctattgttgcgatgaaacactgactgtcttagtcaaggcttcgcgataaaacactgtgaccaaaaagcaagttggggaggacagggtttattcagcttacacttccacattgctgttcatcaacaaaggaagtcaggacaggaactcccacagggcaggaacttggaggcaggagctgattcagaggcctggcggggcagggcgggtgggggggtgttggggtgtgtgtgtgtactgcttattaacttgttcaccaaagcttgctcaatctgctttcttttagaacccagcccagggatggcaccacccacaatgaactgagccttcctccatcaatcactaatttaataaaatgccttacagctggatcttatggaggcattttctcaatttaggttccctcctttcagatgcttctagtttgtgtgtcaaactgacacaacactagccagcacactgaccaaaaccaacttggggaggacaaggtttatttggcttacagattgcagtctatcatcaacagaagccagggtaggaaactggaggcaggaactgaaacagagagtaaggaagaatgctgcttggtggccaggcctcccctggcttgatacacagcccaggcccacctgcccaaggatgatactgtccacagtggactgagtcctcctggcaataagcaattaaggaaatgcttccagtggttccctcagtctctgctccatctttatcctgagcatcttgtaggcaggacaaattttgggtcgaaggttttgtgggtgggttggtgtccttattgctccactgggagttccgcctggctacaggaggtggccttttctggttccatatccccacttctgagagtttcagctaaggtaatcctcattgattcctcagagcctccctcatcccagatttctggcatgtccttgggatgtctatcctcccttgcctgcagatttccattcaatttcatgaccatcttagctatctctcctgtctctccccacaccacaacaccccctctattcccctcagtcccctactgcattcagttccctccttccatttgcctcttatgactgttttattcctccttctgagattcaagctttctcacttgggccttccttctttttttttttttttttttttttttttttttggntttttcgagacagggtttctctgtatagccctggctgtcctcaaagtcagaaatccgcctgcctctgcctcctgagtgctgggattaaaggtgtgtgccgccacgcccggcttgggccttccttcttgtttagcttctttgggtctgtaaattatagcatgggtatcctgaacattacagctaacatccacttatcagtgaatacataacatgcatgtccttttgggtatgagttccctcactcaggatattatttttctagttccttccatttgcctgcaaaactcttgatgtccttggttttaaaagctgagtagtgcaaatgtagtacattttctgtatccattcctctgttgaggggcatctgggttctttccagcttctggctactacaaataaggttgctatgaacatagctgagcatgtgtccttgtggtatagcaggtatacatccaggactgatatagctgggacttggggttgaactactcccagttttctgagaaactatcaaactgatttccaaaatggttgtacaagtttgaactcctaccagcaatgtggctaaagtttctttttttttttttagtataaaatagtttttatttagggcatgggggaggggagttaagagagtaacagaggcagagaaaggcagagagaaggagagagtagagaaggagaggccagccatgaccacgtggagggggaagggaatgggggagagaaggggagaaagggggcaagaggcaagggagagaagcaggagtaagagcctaaagtttcatttttagttgaaaaaaaggccacatactttttttttttttttttttggtttttcgagacagggtttctctgtgtaccctggctgtcctggaactcactctgtagaccaggctggcctcgaactcagaaatctgcctgcttctacctcccaagtgctgggattaaaggcgtgtgccaccactgcccagccctaatattctttctaattagtggtttacactgtgaattctctgtgatactttctcccttctgttatgaactggccttcgttggtgattccacagtgtgaaaatacttttgctaggtgatggtggcttgagcctttaatccctgcactcaggagacagaggcagtggggtctttgagttcaaagttccaaggcagccagaggtacacagcaaaaccctatctcaacaaacaaaacaaagcaagcaatcacagtaactttttttttttcagtttttcaagagagagtttctctgtgtaatcctggtttctttctggtatcaaaaatatgacttaaatactaatttattatcttcattttctaaaggctgggatcttaatgagcttatttttattcaacatgcattttgtaagatttacttggcatcatgactgactaaacataaataggtgatttttaaaagacattattcaaaaaaaaaaaaaaaagccgagcgtagtggtgcacgcctttaattccagcactcaggaggcagaggcaggcagatttctgagttcaaggtctacagagtgagttccaggacagccagggctatacagagaaaccttgtctcaaaaaaccaaaaaaaaaaaatcaatcaatcaatcaaaagacattattcaatctttgaagagcttattgtttagaaagattgaaaccatagccaagcagtggtggcacatgcttttaaccccagcattccggaggcagaggcaggtggatctctgtgagttcaagaccagacatgtcttcagagaaagttacaaggcaaccaggactacagagagaaaccctgtcttgaataaacaaaagacaaacaaacaaaaaaaagtagctgtgattgtttgttgcatacaaatgggaacacgagaaaacagatatattaaggaataagtaaagactttatacacacacacacacacacacacacacacacacacacacactggagatatggtcttactttggagccctgactggcctggaagtatgcatatatgtatattaggctagcatccaacgcatagaaatctgtctggatttgcctcctgagtgctaaagttaaaggtacacatcactaaacttagcctagagtatatatttaatacagctaagtttattggctcagaatttgacctttgaggagcaccagagtttagtgagaattaataaaaggacctttaaagtaaatattttagttgctttatatgaaaaaaaaggcaaacccctcaagatcacatttttttgtggaataataaaagcaacatttattatttttataaaagtatgaacatgaatatagtgatatttatcttaaattctccaaaatcacctatttttcttgtgatccacacataatttatctaaataaattggattgtgttttattagtgtttgttttgttttttgctttttcagtacagggtttctctgtgtagccttggctgtcctagaacttgctctatagaccacaggggcttccaactaagagagattgaccagcccctaccacctgggattaaaggaagattagccactgcattaactaccaccacattaaccaccacaatatttgagccaaatttgaagaaagctttaattaaataccagtcaggatttgaagcttaactttaattaaataccagcctggaggatggactctggccagatcaattcctgggttcccagaaagtgaccaggagttacatcttgcaaaggcttaaaaagacaaccccacaaggccaccatatttcccacctacacccaatcaggggcaagcatacatcctgacatacttcttgcccaaatacctgttacctacatgagatcaaacacatctgtgtagttgggtcaaacaaacttgtttaaaagagtgaaacaatagcctctagtatttcaggaagtatctgtccttgggtaagcgggtttacaggttaagaattttgtttcaaggatctcttaggcacagtaattaaaacacccatacacataaaaataaataaattaaaaatctatcaatagtgaaattgttaaatcaaaatcattaatgcagttataacgtttgtatagaaattattaaacatatttgacacattattcaagaatacagtgcctggttaactatagtcaactattttccaatagatctcttcatttgtgcatgctactgaactgaaatagtctacctttaaccaacatttcctcaccttacccttaagcacttgataaacactattctactctagttctgtgagatcagctttattagattccacatataagtgaaacatgtgtgacatctgtctttctgcggggtttattaatataatgtcctccagattcttacaactaaccaaaataatgtgatttccttcttcttcttcttcttcttcttcttcttcttcttcttcttcttcttcttcttcttcttcttctttttgtttgtttgtttgtttgtttgtttgtttgagacagggtttctctgtatagtcctggctgtcctgaagtcctggaactcactctgtagaccaggctaccttgaactcagaaatccgcctgcctctgcctcccaagtgctgggattaaaggcgtgcgccaccaccacccggcgtgatttccttcttaattatggttgaacaatattccattgcaaactctacagtcatgtctttctccctttctttctttctttctttctttctttctttctttctttctttctttctttcttccttccttccttccttccttccttccttccttccttccttccttccttccttcctttctttctttcttccttccttccttccttccttccttccttccttccttccttcctttctttctttctttctttctttctttctttctttctttctttctttctctctaagacaatgtttctatgtgctgatctggctgtcctaggcctagctctgtagaccaggctggcttcaaaatcaaagagaaccactactgcttactgggtgctggaattaaaggcatgctccacggtacccaacaaaccccattttcttttgttatgcatgcactgactgccttagtatttctgtgtttccttctagactgctttgcataaaggatgttccaatttacattcttagattatgcaaaggctttgtttcacatcctggccaatacttagcttttctcttttcttttctttttttcttctccaccccccactccccaaccgcagacaggatttctctctgtagccctggctgtcctgaaacttactctgtagaccaggctggcctagatctcagaaatcctgcttttgctgcctgccaagtaacttttgtcttttctataatcatcctagcaggcataaggaagtgtcttacagtggtttcagtttgcatttccctggtgatgagtggcttagtttcttttcctgtcactgtgataaaatattctgatgaaagaaacttaaaagaacagctttatttacttcacagttcaagacacagctcttccgggtggggaagtcaagaaggcagaagcttgaagcaggtagccatatcacagtcacagatcagaaagcagagaatgatcagcaggccaatgcttagctttcctttttcattctgtactttccaggcttccttatccaggaaattgttctgcctgaaattaagatgggtcttacaggccgggcgtggtggcgcaaagaaaaataggctacacagagaaaccctgtctcgaaaaacaaaaaacaaaacaaaacaaaataaaataaaataaaaaaagaaagaaagaaaaccaggcatggtcaggtgtttctaggttgacaaccattagtcatgctaagcatgttttcatatatctgatatagctgaatgtataataatatcattcatatatatatatatatatatatatatatatatatatgtgcaattattttctcccattctgtacattgtctcatcacacttgatttttttcaaaagtttattatgtttgatgtgaaaatcacttgttttttttccttgtccatgtttttcatgtcatagccccaaagtctttactcagactggtatcagagagtttgtctccatgtattactgcattagttactttgctatcactgttgtgatgcatcatgatgaggtaacttctggaaaacaggctttatttggtcttatatttccagaggcttagaggccctgatgtagagcggaggcagtgggccgtagacaaggcagctggagcagaagcattttccaaatcacaagcagtaagcagagaaggaaccaaacatggtgcaaatctttaaactcttaaagcccaccttcaggcacatatgtcctccatccaggccatacctcctgaaccttccaaaacagttccaccaacctgggaccagtactcaaatgctgagactgtggtatatatctctaatctcagcacttgagagacaaggatcatgaatactgccacaagtttgaggccaacctggcccacatagtgagttctaggccaggcaaagatgtaaagtaagaccatggctccaaaaataactaaataaaataaaaaatgtttactagtatattatattttttaatgcgtagatctacatatctttggttaaaattatttctaagtatgttcacaactgtaagtgagattgcttctgtgaaatctttcatcaattatttcctattagcatgtcaacttattattgacttttgcatattgattttgtgtcctgtcattttccttctcagatctaacagcttctggtcttctgaaagattataagataatgttatctggaaacaaggaaaattttaacttattttttcaacttctgtcataacaaaatatgggttaagccacaatcactatgacacaagccaagatcctattcttcatcaatgtgatgaaggaaagaaacactaaaagaacagtacagatgagtaggaaaggctggtttcttaatttattcctaaaaggaggtcaaatggatgcatgtgttcagatttcacattaaattgagcatctgggactagaactggaacatttcactacatggtattaacacattaaatgcatgtggtgatagagactaggattatgatcctttaaaaatagtgttatcgctgggcatggtgacacacgcctttaatcccagcactcaggaggcagaggtaggcagatttctgagttagaggccagcctggtctacagagtgagttccaggacagccagggctacacagagaaaccctggcttgaaaaactgaaaaaaaaaatagtgttgtcaaccagacaataaggtgctctacagtatatgtttaggttactcatcacttactatataggtagcaattttaaaacaaaaaaaggaaggcaaatgaactccaacttttttcaatttctctgttataatcaataagaaaacaaacaccagggctagtaagatggttccgcgggtaagagcactgactgctcttctgaaggttgtgagttcaaatcccagcaaccacatggtagctcacaaccaccggtaatgagatctgacaccctcttctggtgcatctgaagacagctacagtgtacttatatataataataaataaatcttaaaaaaaaagaaaagaatccagcacttgggagacagaggcaggcagatttctgagttcaaggccagcctggtctacagtgagagttccaggacagccagggctacacagagaaaccctgtctcaaaaaaaaaaaaaaaaaaaaaaaaaaaaaaaaaagaaaagaaaagaaaacaaacacaaatttggttctatgtgaacatttcaaaatatagcattgaacaagaggaccaagaccaaaaatgtgtgtcagaaattcaactgtggccgggcgtggtggcgcacgcctttgatcccagcactcgggaggcagaggcaggcggatttctgggttcgaggccagcctggtttacaaagtgagttccaggacagccagggctatacagagaaaccctgtctcaaaaaaacaaaaaaaaaaaacaaaaaaaaaaaagaaaagaaaagaaaagaaaagaaaagaaaaaagaaaaaaagaaagaaattcaactgtgggccaggcagtggtggcacacgactttaatcccagcactcgggaggcagaggcaggtgaatttctgagttcgaggccagcctggtctacagagtgagttccaggacagccagggctatacagagaaaccctgtctcaaaaaaaaaaaaaaaaacccaaaaatcaaacaacaacaacaacagaaaagaaattcaagtgtgagcattggcccctttgcacagctttctagggttaataaggagaagctgcaccagcagcaggatttcagtaattaaggaaagctcttctcatctagaggtctgtctataggccaacactgatttgtacaaatcttttttttttttgttttttttttgttttttgtttttctgcctgcctctgcctcctctgcctcctctgcctcagcctctgcctccagtgctgggattaaaggcgtgtgctaccatgcctgcttacaaatcttttagtagatgagctccatgcacaggacaggaacatgtcagaatggatgaatgatctgtatactatataatttttgtcactcgtatttatagagtgcctgaataccaagtagtaattaaattactcttctgtactttccacaacttcatttacagcatattccttatgaactgcttcccctagatttttcataattagtgtcatcttttgaatacagttcatagtccctggcagaaagacaaaggagctatttttgcctgataataaatacccaataatcaacaagcccaagtttagctcttcagaactctttaagttccactttttccaagattcttcccttgttttttgttttttctgttttttttagatttaattaatttattttatgtatatgagtacactgtagctgtacagatggttgtgagccatcatgtggttgctgggatttgaaatcaggacctctggaagaacagtcagtactcttaacctctgagccatctctctagcccccttgttttattttttaaattttattttcaacaacttcataatgcacataagatactgggatcatatctatcctctcttaatcccccctctcctatagactcctttctcttccaaactggttcctgtcttaattttctctctttctctccctccctcccttcctatttttcttcacttacctcgtccttgtttcctcctcctccatcttcttggtttttttttttttttttgagacagggtttctctgtgtagccctggctgtcctggaactcactctgtagaccaggctggccttgaactcagaaatctgcctgcctcttcttcctaagtgctgggattaaaggcgatcgccaccatgccagactaattttacttattttaaaaactctttttgctccccttccttttctctctcttgctctggtcctgcttgctccaggccctgcttgctcctcctctgccccctacactcattatgctcattatggctcataggtttttgttgttgtttgtttctcattatggatggtggtgagccaccatgtggttgctgggatttgaactcatgacctcagtcagtgctcttaaccgctgagccatctcaccagcccttaaaaacttttttttttaaatgaatgaggcaatttattaacccagcattgtttgttttaatgctttttgttggcagttgctacctgtccagcgatcctgtccagatgtctctgtccctgatgtgttagcttgcagtccccatctcggccattttcagcccctccagggcttggaggacctggctggccacactctcagagcctctgcttaagtggctgggcctaacaccatttctctgccatcctctgtagatcttggtcacagaaccaacccctgcaccaccgcggaggtacaggtgccgagctgtggaagcatttcgtgggtagaaccagttctcatcatatgggcaagctctttatgtttggccagctttactgtgtccacacattccgggactctcagtttcctggactttttgaggaaggctgctagagctctgacgatctcctgctggttaaagtcttttacagtaactccaggaatctctctgctgcctgggctctggaattgtggcgatcagccatgtccgggcctgcctctcacacgtggccccttaaaaactcttaaaataaatttgcctacatttgtctgtgcatcacacatgtgtctggtgcccatgtagaccagaaaagggcatcagatcccctgaaactttagttgtagatggttgtgatctgatatcatgtgagtgctgagaaccaaacccaggttctttttttatttttaaagattttatttattattttatgtaaatacactgtagctgtcttcacacactccagaagagggagtcagatctcgttacggatggttgctgggatttgaactctggaccttcggaagagcagtcgggtgctcttacccactgagccatctcaccagccccaaacccaggctctttgcaagaacaggcagtgcttttaactgccgagctatgtctcctggccaacgtcttatttttgtgctgggcttctgaaggtcaccatgcttacctgctgtgttcatggttaactgaccatatcatatccaggaggccatgtttcatcaaattcctccccatcctccagctcttataatgattcttcctctttttccttgatgccccttgaatctttgaaagaatgatatagccgggcgtggtggcacacacctttaatcccagcactcgggaggcagaggcaggcggatttctgagttcgaggccagcctggtctacagagtgagttccaggacagccagggctatacagaggaaccctgcgtcaaaaacaaacaaacaaccatcagggctgggtgtcatggtgcacatctttaatttcagcatttctgattggctagacagactgcccaatctgac

SEQ ID NO: 34 - skipped

SEQ ID NO: 35 - DNA, 32094 bp, Homo sapien
ggaagtcaagaatttcgcgacgttaagcgacgacgtcggtataaagaatgagagagccccgaccttcgaaggactgacttctagagagacgtgaaccccaagaaagatcttgtaaaagatcagggggttgtgggaaataccgcataaagaaatttttttagtggatttaaggtattttataaaaaaatttaagatatgaaagaggatcacagaagaactgtgcaggaggtataaaaaaatttctttcataaaccttataaaactccgttaaaaattataaattccttaaaaagaaaccttagtaaaaaccaactgtagagacaaaaaacacctagtcaaaaaatgagaaggtgagagaaaagatataaaacgggtagccccgacgcctatggaccaaaataataaaaaagaaacgggttgccccggcacctatggacggaaaattaagaaaaaataagcgggtagccccggcgcctatggacgaaaaataaaaaaaaaggaatcgggtagccccatagcctatggacgactaagggaaggggagacttgggggttgtgagaccgggtagccccactgcctatagacgaaaaatttttaaaagaaaaaaaccgggtagccccgaagcctatggacgaaaaaaaaaaaaataaaaaggaacgggtagccccggagcctatggacgaaattaaaaacaaaaagaccgggtagccccggcgcctatggacgaaactaaaaaaaaaaagtagcgggtagccacgaaaaatacctacttttttacaaccaaaacacccaacaacgtgagagaccttatagatgtgaaaaaaaacgacgactagtaaaccaccacacactcacatggatggcgaaaccgtctcttactgagacgtcaattcgattcccgcacaagtctaacacctccttttcaccggcggtaaaatctgaacggcgtattgagccgaatcccgatcagcaaacacgattcaatttgatccctccgttctacctactatcgtccagtccgtctccttcagtacacgtaacgtactcgatttggatagacttacttaactaaaccccgaacaatcctcgaaacgcactaacaacatagccctccgtcattcttagtagaaaatagtcatgttccctgatcaatttttaccttccaatcctttctgattccacgtcccgaattttaccgctaaaactgtaacgccgtaacgagtcgtaccgcccgacacgaaacaatccaacaggttttaccgcctaggtcaagacagcgtcacaagttcaccgcccttccggtgtagtactacccgctccgaaacaattcaccaatcgtaccaccacctgtacacgccagtgtgtccttttctaccgccgacttccagaacggcgtcacattttgtaccgcccggagaaacagaaacgacacacgaaaagcacaacccaaaacggcgtccctgttataccgtccgcaacagtatacatatagtaccgaaaacagtgcacctgtagtaccgcccgaacggcgtaacaatttctaccgcccaaaacggcggatcacggtgcgtctcgccctcttttccaccctacctgtcacgacctaacgacgtattgggttggttaatctttacccccaccttaactagtgtcggttaatctcgtcttctaccttaatctgactactgtgtgacaggtcgatgagtcgcttctggacccacttaatcgtaccgtgaagcgtcgacagaaatcggtcagtcctctttcttcacctccccggtgcacatacagagggtcacccgccatgtggtccacaaaagttccagaaaagttcctgtaaatcggaaaggtggagacaggggagaataaacaggggaggacaggtcacgacggagaacgtcacgacctatagaccgacacaccagacttggagggaggtaaggagacataaccacggagtggattccgattcatatggaggggggggtggggggttgggggggttgaggggtgggggtggggggtggggggtggaggggtggggggatggggggatggggggatggggggagaccagacgggacgtgacgtgacaacggtacccgtcacgaggtccggacgaaccacacctgtaccaccactcggcaccgttcctggtcttacctagtgtctactagcaaccggttgtccaccgtcttctccttaaggacggaaggagttctccttgtggatggggaaccgattacgaccccagcctaaaactaaatataaatagaaaacctacagtcagtatgtcagactaaaacaccaaacgatcacaaacttaaattcagaattcactgataatatctttacataattctccgaaataaacatcttaagtgaaattaatgtaaattactcaaaaacaaaactcaaggaattttaaggaatttcaaaaatcgaagagtaatgtttaaggaattggaaaaaaaccgtcatctatcagtttcagtttagtaaagattacaaaatttttacacgaccagtaaaagaaactttaactgaattgataaaaggaaacttctcagacatcgtgtctttgtcattttttaaattgaagtactggattacattttttctcacaaacttccaaatgtgtccaggtccggaacgaaacaagggtaggaactacgacgtgattaactgattagtggatgaatagtctgtcctttgaacttaacgacaccagaccacaggagataagtctgaataatataacctcataaagttaaaaagcaacataggacggacggatcgtaggtcaaggaggggtcgggacgagggtcgtttggggatcagatcggggtcgggatgagggtggggcggggtcgggacggggtcggggtcaggggattggggggtcgggatcggggtcagggtcaggatcaaggagtcagggcgggtcgaagagagctttcagtgagattaaaagtaactaagtcacgagttttattcaacaggtaacgaataggataatatgaccctataaggcaaatgggaaccgtaacgactagaagtcatgactgaggaactggtaaaagtcaattacgtatgttagggtaaacagacactagagtcctgtttcttaaaggaatgagccatgcaacttcaatcccttacagttaactctcgaaagatagtctcgtaataacgggtgttaaactcaatgaatagtaaaagagctaggggacgggaatttcctctttggtaaagagacagtaacgaagacatcagtgtcagggttaaaactcatcactagaaaagaacacatgacacaaccggtggattttgagaaacgtaactcattttaagattaacggttattaggatgggtaacctaatctgtcgtgagacttggggtaaacgtaagtcgtcccccagcgtctgttgggcagaaaacaacctgtcaattttacgagtcagggttaacagtatcgaaacggataatttgtttccgtgggatgacgcgaaaaacgacacgaagacctcttaggacgacaagaacctgttaatttcttgtttcatcattaacgattaacagagtgggtaattagtacttctgatggtcagcgggaacgtaaacggaactccgtcgcgactgatggactctaaattctcaaagaatttaataactcattttagggttaataggtatcaagacaatcaatgtgataccggaaacgtttgtagaaacgtattgtcgtcaccctgactgagtaagaatctcggggaagggaaccttataattacctatgttatcattaataagtaccaagacgcattgtctcttctgggtgaatacacatacggaaatagtaacgaggatctatcacacttgatggatggtggaacgtaattatacattttgtgattaacgggtatcagggtgagtaatcagatcctacaggagaaacggtaacgacgactcaagactgatgggttcaaaggaagagaatttgtcaactatacgtattaacgtatataagtaccaagacacgttatttttacctaagagtggggtagggtggaagacaccctacaacgattgctcacgtctaataagttattgtcgagaacttgtcaattaaacgtgtcaacgttaacaggtctcaggacaggtaatctttccctgagacataggataaacgtgcgatgttacacccgactagtgggttcctgagaagaacacgtaactacaagtattaacataaacaggtgctagaacacgtgattgggaaggtgagggaaacataaggtcgtcccctgggaatgatgagttctggagacatgatcctgtcaaatacacgtgttaggattaactaatcttgactcagaaaatatagttccagggacgtagtagaaacgaaatgtagttctcccacgaccaatggattacggggaggaggtctttaataactacacgttttacgttaaagggatagacgacaatcagaccccagagtaggggagtataaggaaaacagaatgtcgtcccccatgaaccctgacaattacgcgtattaacgttaataccagaaaaggtaatttaattctagggttgacgagtgtgggagaatcgtaatgtcatctcccacgattagtgttcctgtaaagaaaacatgacaattacacgatgaacgtaaacagggagaaggacacgtgatttctggggtgagtgaagggatcacaagtcgtcacctactggagatcagttctggaaacgtgatcctatcaattacacttggtaccgttgactagtgttgttacagaaagtctagtctaggtaaaataggaggaacaaaatgtcgttccctataattaatggatacaatggaaagggaccctgatacttacacgttttaaggttacaagtaccagagagggaaatttggatataagatggggaaaatgtaatatctttccctacgacctttgggtctcaggaagagaaccctgagaattacacataaagattaataggtactgagaattacacgtataaaagttaacggattaactaaagttaacagattctgtaaagtttacagattaactaatcttgactcagaaaatatagttcgattatagatcgaaaatatagttcgattatagaactgaagagtcgtagtatcttcccccatgactaaaggatttcagaaagaacttaaagataatacgttttaacgggactccggcccacaccaccgagtgtggacattagggtcgtgaaaccctccgactccacccttctagggaatgacggtcctcaaactctggtcggaccggttgtaattttttttttttttcattctgttaacgggaccttagggtagggggagtgtggaggaaccgtttcgtcgtcctcacgattgatcgatcacgaagaagagaatatgacgaatttacgcgtattaatcgtcatcaactacacggggatacaatctcatcttagggcgaaggaacgaggtaaacgtaatgacgtcctcgaagattgatcggacttaagtgagagaacctgacaattacacgtatgaatataaacgacgacatgaaaaaatggtacattcctggggtgggtgacataaatgtagggtcgaccttcatggatgatgaattctgggaatctgatcatttcaatcgcacgtattagaatccacaatatatgtgtaaaagtcaacgtatgtcaacacggaaaatagtcctgaggacatgaatagtttcgtctctcacgattagttataattcgggaagagaagcttgacatctaccgtacattaacgtcaacagttaccaggaagttaatctgaacccaaagactggatagtgtgggagaaacgaaataacgtaccccatgataagtgaattccggggaaagagtttgacaattacacggattactgttaatgtagtcataggaaggaaaacttcctgtcgtaccaaccactgtggattccggggtaaagaaccggagggttatacacactaacataaacagctccaacgatacgtgatctcttcctttcacgaggggagtaggggtgaaaagggaaggtcgtccttcacgggtggggtattctgggaaaataaacctctcagatccacgtgttaacattcactggtgttcgtacgtagaacctgtaaatacacgcattagcgtgtgacgagtaaggtacacttattccaggatgagaggctggggaaaacgttatgtcttcccaacgactattgcgtcaggggaaaagaaccgtacaacacacactaatattagcagaccctaggatacgtgatcttttcctcccaggagaggtgtatggagtcagagtggaaagggaaggtcgtccctcacgggtgaggtattctgagagtgtaaacctgtcagttccacgcattaacaattcacttgtgttggtacgtggaatctgtacctaaacgtattgatgtgtgtcgagttggatagacttattttaggatgagagtctggggaaaacgtcatgtcgtccccacgactagtggttccgggaaaaaggaccggaccatacgcacactaatacaaacagggccaaggacacataatctgtaccttcggaggggacggtgtgaggtgggggttagaaggaaagggaaggccgtccctcacgggagaggtattctgcgaatgcaaacctgttagttccacgtgtcaacattcactggtgtccgtatgtggaacctgtaattacacgtattggtgaaacgggtaaggtagacttattccaggatgagagtctggggaaaacgtcatgtcgtccccacgactagtggttccggggaaaagaaccggacaatacacgcactaatataaacagacccaaggacacataatctgttccttcggaaggggggcgggggtgggggtgagggtcagaaggaaagggaaggtcgtccctcacgggggaggtattctagtaatgtaaacctgttagttccacgtgttaatattcactggtgtcggtacgtggaacctgtaataacctgtaattacacgcattgacgtgtaccgggtagggtagacttattccaggatgagagtctacgggaaacgtcatgtcgtccccatgacttagtggttccgggaaaaagaaccggacaatacacacactaatataaatagggtcaaagacacattatctgtactttcggaggggacggtgtggggtggaggttagaaggaaagggaaggtggtccctcacaggtgaggtatatgggaatgtaaacctgttagttccacgtgttaacattcactcgtatccgtgagtggaacctgtacttacacgtattgacgtgtaccgggtagggtagacttattccaggatgagagtctgggaaaaacgtcatgtcgtccccacgactagtggttccggggaaaaggaccggacaatacacacactaatataaacaaggtcaaggacacattatctgtaccttcggaggggacggtgtgaggtgggggttagaaggaaagggaagaccgtccttcatgggcgaggtattctgggaatgtaaacctgtcagttccacgtgttaacatacactggtgttggtacgtggaacctgtatttacacacattgacgtgtaccgggtagggtagacttattccaggatgagagtctggggaaaacgtcatgtcatccacacgactattggttccggggagaaggaccggacaattgcatacactaatataaacagacccaaggtcacatattctgtaccttcggaggggacggggtggggtgggagttagaaggaaagggaagaccgtccctcacggtcgaggtattcttggaatgtaaacctgtcagttccacgtgttaagattcactggcgtcggtacgtggaaccagttattacacacattgacgtgtgccggatagagtagacttattccggaatgagagtctggggaaaacgtcatgtcgtccccacgactattggttccgggtaaaaggaccggacaatacacacactaatataaacaggtccaaagacacatgatctgttccttcggaggagacggggtagggtagatgcgtattagaaagaaaaggagggtcgtccctcacgagtgaggtattctgggaatgtaaacctgttagttccacgtgttaacattcactggtgttggtacgtagaacctttaaatacacgtattgacgtgtaccgaataggataaacttatttcaggatgagagtctgggggaaacgtcatatcgaccccacgactagtgactccggagaaacgaaccgaacagatataagaacacatgatctattcccgtggaagagtacctgagggaaacgaaaagttgttcctcatgggtgatgaaaaattctaagaatataaacaggtttcatgtaccaaaattaactggtgttgttacagggaacctgtaattacatacattagtggtgtaccaagtaggattaatttgtttcaagatggaagagtgggaggtaaacgtcatatggtcccaacgactgggggattcaggggaaaagaaccgaacaactgtacgtattaacgtaaatacaaccaagaacacgggatctgttcctacggggtggagaaaagttatcacccacgggtgaggaatactagaaatgtaaacttgtcaattacacttattaacgtcaacaggtgttgggatagtgaagatcctggtaatatggagaaaacgtaatgacaccccatatgacaaagggaggttccggggaagaccacctgatagttgtatattaactttaaaagaaaacagaaacagtcatctaattccagtatggggtagtggaaaggaaacatcatgttgtcccacaggactagttggtttcaggacaacaaaacctgacaattatacacgttaatgtaaacgaggactagacacgtgatctattcctaggatggatgaaagaatcacaaaaatcgtccatcacgggtgatgagttctgacagtgaaccttacaagtacacgtgtttgagttaagagattcgtacaaggacatggtggaaacgaaatctcgtccccctactataagtgattcacggggaagaaaacctgaattatacgtaattacgttaacaggtggagaagaaaatctgattctcaactagaggtgtataaggggaacgtagtccccgtacaattaatacttacttgggaaaagaaaattataattacagtattaacataaacacctggacacatcctctttttctgggatacaaggagggtaatgggaaacctaacgacgactcttcacaattgatgagtattagagtcgagaacctgttaattatcgtaattattgttaatagttcccgtgactagtaatctattctgaggacgaaggagcaacgaatgtagcccccatgactgggtgattccggggaacatgacaattacacttataaacgttaatatatacagaggaagaccatctcaccctataatacgggatcataggggaaacgtaatgacgtccccgacgactgatgagttttgaagaggaccctgacaattatccgtgttaccgtcaatagttaccaaaagagggagggactggaacaattcgttcgcggggtggggtgggaatcaaagggtaccgtattatttcatattcgtaacctcataaggtacgtgaacagatagtttgtcaccaggtatgagggttgggaaaacgtaacgcggtcacacattttagtgtccatcggtaccacagtacgaaatatatgcttcagaagggagagagacggggaacacacgggaaccggggaaaaatgtctgataacgagtgttagagtccacaggtataaacgtcgataatccattctaacacgacagagggagaagggaagggagacgggacggggaaaacggagaaacgacccattacaactggtctgttccgggaaagagaacctgaatttgttaagagtcaacgtgaaaggaaccagggtgggtaatatgtacttggggagatgaaggaaagcgtaacgaagactcatacgactgatgggtttcggggaagacacaataattatttgtgtcatgactaacagggtaaaaagtcgggtagtcaggttctagagggatggtgaaaccacacaaccacgtcacaactgatacttttcgtccggacttgatccacctattcggaagtgagtaaaagaaagtaaataattactaggatcaaagttaataacagtctaagacccctgttcttggtaagaacgggtggacacaatgacgaaatgacacgttttatgacttccgttcagtctgggtccctcgacctaacggtaggaaataaaacacaaaggtcacatgtgatattttaacagaggggtccttccttccaaccgtgaaagagacgtaagaagaaaggtctcgtctaacggaccaattcttagagaacaacaggggaaacatataacaataacatttcacggtttacggtcctatgtcggtctttttaacgaataataataatttttttaaaaaaattctttctgtagacctaacatcccacctgagctattggaccagtaataaaaaaacttcggttttataggtaaatatgatacatggaccactggtcacagagagtaaaattgactcccaccacccagacacctatcttgtgactgagaacgataaaattatagtttctataagatctcaccttgagaattctggtcatagaaacacacccgaaatggtcgtaagtgaaaatctttttgatggatttaaaatattaggaaattaaagaagtagacctcgtggacggggatgaataaagttcttctaacgtcattttgctaatttactcccttgtatacgtctccacgaaaatttttcgtatacggtggaaaaaataattaataatatattttacttcgtaaattaatatcattattaaacttcatcaaacttcatggtgtgactccactcctgaatttttactattctgctcaagggataaaatattctttttattcggttttaatttataagaaaacctatatttaaagttgtcactctatcgacggatcacctttacttattatagggtcggtgatcacatgtcccacaaaacaccgtgtcctaatacattataccttgacgagttcgtttattgatcagtagtgttgtcgtcaagaaacattattgactttttcttataacaaagagcctcttcctacagttttctagccgggtcgagtccctcgtcaaacgggatgatcgaggagcctgtcgacatttcttctcagagaccgagaaatcttatgacattcatgatgaagcatcgataattcattagaaaaaggataagataaaagaaagagaatctacggtggatatcttttcagtctcccaggtcattcaaagaaaggaagaagggtggagtagacgttatatatatatatctctctctttatctatgtatgtatgtacgtatttatgtgtatacactcaattggtcgtcttgacatcttaattataacacctgggtcgagatacgatccaatgtgactattggacccatccttactatagtaggatatattaaagtaaggactctactaaaatagcaactcctcgattacactcgtgtaaactttattgaaatcttttattattcacgacaaaacacacttagtattcatcatcaaaatccttcccttgggtgttcctaaacttcaactatcttatttgaattccttcacccaaacgaaaaagagaaattcggttctatcctaattataacgtcggtagacctatcaggtcaaccaaataaaattaaagtaaacaaaaaatggagaaaacctcggtacctttctctactttccctatctcgtatcggtaacacaaaccgataaacgcttccaaccgtttaatcactaacgatttagagtattcgaactcataaaatttcaagtctctaactcccgtatttagattatgaagccgaggaaggtgttaaaatgatgtaaagacgggttcttgtctactggtacctattacgtatagcatctatgaaaaattcaaaccttggaaaaacggttctcccatcacctcttcacttcagttttggaactggaaggaacggatgaaatacgacatcaaatatatggaagaaaggagggtggaaagcatttcgattttcttcgaatcggaggaattacaaaaggtcgactgttttataacaaattgtattgtaagctttgaaaaaaagaccacgtgtaagtacgtagtgtcgtcctcgttgttcttggtatattcacttgaccgaagtgaatatcgggcaaaattaagtataggtataaaggagtcccgaacaaaggtacggagggtcggggtgaggtatacgaattgttgtaacagaccgactgactcccaatatatgtagtaccagaacttggaagaacctttgtaccagacacggtaacaaagagtttgggttcattacgaagtactactttgtggaagatttccttgttttaaaagactctaggatttttttacacaaaactccttgtgactgaattgtttctataaactttacatttatacaaaaggttaaagtgcaacagaaacagtttctacacaaaatatattgaatacatcttgaacccctaggtaatcttatataagtgtttaggggtcccaatagtggggttaaactctttgggaccagatacgaatactttagaagataaccattaatttaacagtaagtaacagttgtatgttaatattaataataaccttaaacaaaatttacttacttaaacctccactaagacatggaattcagttctccttcctaccgaactaaaatccacctaactaatatgatctatcgtaggtttccacttagaacttcgacataaatttaagtaacgaactttattaaaggtgggaattctttttagagatcgttaacatttttccctacgagacctttacacccgtagaagttttatctctattaagaacacaatcaagttgtttataataacatggtccacgaccttatttatcgttttggtttctgtcctaaatatagttccttaaacgaaagaatacctcctacgtcttcctttagtaataccaaaacccgtctttacgaatctgaaatcaggaccgagactcaaaccaagtctagtggtagttagactggtagagctctgacgatcactttattctatccccgaatatagtttatggatttagggacttttactgtaaaacactaaaccttttaaaagttttcagattacttcctttgaaaaaaccgtaaagaaatttactaataacagtaaagaaaagactgaaaagggaaatattttggaattgtacatcctaacctccttcaaaagactggtaaaagagtataggagaaagtcgaaatagaaagacattgaaggtaaagagatcggtggagggatttaatgtcttctgacactctgggtcccgacgacactaatccgtaagtattaaagaaaagtcccacaaacacgggactaatagtttacatgtcgaacttccctcaagtacagaatttcattacttaattctcaactggaaacaactgacgattttataagaatatacactttcgtaggacctttttatgcaatggtcgaatttctctttctttgattactaatatagacttgactcgattacggagaagagaagggggtttggaatagtcaaacctaccgtttctcattactacacagtcaatttgtctcgattacggaaggagacggaacagaatttctgacctaaccctcttttaactataagagtgatggtataaaacccgacatccgttcatcgtaaaatgtgtccaaaggaagtttttaggttgagttcaacctcgagtacataaattctgtatcgaccggacgacttaaattgttcaatttgaagtcaccggtacatgtcaatatatagtgatatatatacacataatccgacagctcaaccagtacaaaaacaaccactgaatccgaaatgaactatcgagaaggaactggaaaggtttaactcatgactatgtacctcgaacccgaagaagacgtagaatatgtttactcaaaccatttcttcggagaggaaatgacaaaactacaaatataatctttattgaaaactaataaaaaaaagtacaatcctactctttgactttgttttacatttaaactggccacgatctgaagaatttaatacccatctgaatttcataataaaaggaattggttaatcttacgatcagaagatcacaagggcctttgtactctccaatacgtcatctgggttcgttatgggagaataatgtattagttcacgcatattcttaaatttttatccctatactgaccttgtagtgacatgaaatggtccagggtaatattttaatagatacaatgaaatgggtatcgaaacttttgatcaccgtatcatataaaatatcatacgacaatcacactaaccgtaacttgtcactaccctatattagtgagatgttagatatacaataatttcaaaaggtcggaatatctagagggaactgacttttaatcgatgattgaatgctgaataaaaaatgtcgtctaactgatccagaaaggtcctttagacaactacatgtttttgtttcaaattaacgattacaaaaaaattttttattgaaaaactataatgcctatggaccaataaacccggaacatataaaattgtagttttaatggataatatttaggtatatttgtcttttctttctctcattcagaaatctagtctagacgtttgttactaccatgcatgacatctttttagaccttgtatctgaatggtcaagaatccaaggtaaaacgaacgaaaaatttttgacacagaatattcagaagtcgttgaccaaccctctaaaaatcttttttattggaaaattacaatcttgtcacatctctaaatgtcttactaagacttctatctcaaagacacatgaagtgtgggtcaaaaagggtcacaattgtaaaatgtaatcaaaccatgtaaacagtgttgtttggttataactatgtaataataattgatctcaggtataaaataagtctaaaggaatcaaaaaggaattacaagaaaaacacaaggtcctagggtaacttctatggtgcgacgtacacaggaatcatcagtacagaggaatccgaggagaaccattactgtcaaagagtctgagaaacaaaaactacttgaagtgtcaaaactcctgattaccaggtcataagatatcttacagagagataaccttaaacagactacaagaagagtactgatctaacccaaatactcacaaatcctccttctggtgtttccatctcacggtaagaatagtgaatagttctcatgtatgatagttgtactgaatagtgacaaatacaataggaattagtggacagactccatgataaacagtccaaagaggtcgcattttaatcagaaataaagaggtaaagggatgatatgacaagtgtatccttcagtgatacacgtcggtcgtgaattccttaccctttaatggaaggtggagtaactcccgtctcataaatgtatttaataaaccttaagaaaacgtgtcctacagaaaagaggtgttacataacacaaataagtcagtaaatatagtcatactagagtccctataaaatatgagacccaatattatgtcataatgaaataagacaacaagtttaacaaggtcgaaaccggtaaccctccagaaagtaaaccgaaactatattggggtacttacacccaaaaaacaaactcgtgaaagaataaaaaccttgatgttgtacgaagtctgagtaaacgtatagaggacggacctggattttactacataaagacgttcctcggaactatgaaaaataacctctcattataatctttagttcttcacttacgatccacgcgagtaatgatgacctcacagtaaggaagttctggaaaagtcaactgttctcgttcctctatatataaacgtaagattgcacacatatacgtgtatcgatatttatatatattggtagacatagatataatttgatttacacaaatatggatgcagaggttgagattagtaacggtgtacctagtaatatcagagtggaggaacgaatagacaatggagggtaaagatgtcactctttggaccgaaccaaccctttaaaaagacaattataatgccatcactcacaaactgtaaacgaagataccaattcaaatccctctcaaatcgacatcccataagaactttgatctttactgggaagacgggatttacaaagacggtcaaaactttgcattttatccaacgtctttgtttgaaatagaattcttggtcttaaatgaagttaggtgtaaaactgtaactaaaagtctaatttaataagactatagcggtccattcgacaaggaacccatacgtaaagaagaaaggcaaaaaaagattctcgatttcctgggactcttgtgacctccaccctttccttccctttccgtacaagtgtgcaccctatcctttccaagtaaatgactggaggtcgatcggaaggtttcacggataaattctgggttcctcatctacagaaggaaccgttaacattgggtttatattaaaaattggaaagttaaaatcagttctttcaaccacacgacaatgtttttcacgggactaattgtcgtaacagtacacgtaacgtataattagtcgttaaattttattgtactttaatacaactcatattaaaattataaaatataatctataatcaaactctgtcacaaagagttcagacatattattcaaactatcatccctccaaaagagagttcttttcttaataagtcacacgtggatgtattagtgacgaatctaagatgttaattataaaacgatataaactaatttgcaaaagacattttctttttataataatacatgataaatccaaatacccttattaacaattcaatttcacatacttgtttggaccttactttagacaaacggatgtagatattatgttgatattttgtatcgtctacatgtttaatcatcaattatctattgattttacgtttataccgtgatgataatatcataatatcaaagaaaactcaccgcacagacattatagtgtacgacacaactacgtgaagtggtttgacgacaaaagtttgacgaaatttaggacggtaatatcgtgtatcgttacgataaagtgaaagtaaaccgtgttttgtgtaaatatataacaaacgaagagaagaaaagacattaggggtccgttgttttgatcttgtaaacggtgattagaccgttgcaccaggatataatacttcatcagtatatcgactagatttgataggaatgtcactttactctcataacactttcaaaacatctttcgaggggtatacaggactcttagatacgtgtctggggtgtcaattttctggaaacttaacacccttctgtacccaaattcatagtgaaccaatggaagataaacacattgtaactccatcaaagtagaagacccaagggtcaaaggaatctcttacttttacaacttaatacactaaaaaaaaaaaaaaactctgcctcaaaacgagaaagcgggtccgacctcacttcatcgtgctagagctgagtgacgttggaggaagggggtactagttcgttaagaggacggagtcggagggttcatcgaccctaatgtccgtgggcggggggtggggggcgggggtcgattacaaacataaaaatcatgtctacctcaaaacggcacaaccggtccgaccagagcttgaagactggagtccactaggtgagcggaaccggagggtttcacgatcctaatgtccgtactcggtgacgcggaccggatacactaataattatagtgcagatcgacactgttaagacagactacgacctcataaacttggtctaccgaccgacacggtgagtcaataagagaggtattctgaaactataaaacaaccagacgttctactgcctaagagttttaagaacagtcacttataacttgggatcactttacataccaagacatagtcaaggttttacattggtgaaagagatcggaatctaagggtcaaggttttacattggtaaaagagatcggaatctaagggcaattccctttcccttacgagaaactcatacagtagtggtatcattgtccgttttgatctcccgaaactacgatttcgttctatgaggtatttatacgaattcttctgaacccctctgaccttatcaacaagggaaaatctacggtcacatatttacttaaactcgatcctaggcaaataaattttaaagaaatccacataaacgaacgtatacctcacgtgtaaatgagagtaattacctcaaaatccttcgtcatctcatttacgtatttgtacatacttggcggtacaaattgaccttcggacgtaaaccttcagttcatagattagaatctaatttaatcctaccccttcctacaaccgttctctaaaacttcgaacaagacgaatataactcttgtagtatcttgtcaaaccggaaaaatttcgatctcttatcacaacttattcactacaaggtatataaggacaaactgtaactgtatttccaaaggagtactatgtcattagggactagtccctagaccttcggacataagtaaattccatgagtccaaattgtatgacccacgaaaagtgtggtatgatatgtcatggtacgtttcacgaaagttctgacgtttaaaccgaatctaggggaaatcactcgaggatacgatatcatttccatctatcggttaataatttttgtcagttctgttaacgtggagattcgtcatcatcgtcaacggtgtggtggaacttagaacttcataaaagtcgttgtcctactggtaatcggtgtttaaatcacagtcgggaattccagccataaccaaactgggtataaaagtacatcaagaaaaagaagtgaacagattagaagggcacatgacggtcccgaacagtaatctcctgaaatccctctggttcgtccgatctttcatctctgtcctctatggatacagattacgaagtcaaatatgaaggatccaaaaaaagtaaccccaaaaacattgagaaaaccataggatggccacgaaaccatcggatgacttgggacagaaagaagaattcctgtaagactcgtacactctggactcctgacgtttgtcgatattctccgaggtttaattagtatagaaagggaaactcttagaccggttcgaggtcgattagatgaacctacccaacggtcgatagacctctttttccatcaaaccccttaaataacaacatcacgaagacagaaacctaacttgaagggtgttgagaggaaaaatttcgtcttgtgtcgacccgtaccaccgaggacgaacattaaggtcccgaaaccctccaactccacccccctagtgaactccggtcctcaacttctgggtacagagatgttattttattttaatcaacccgtaccaccatgcacggacatcaggatggatgagacctccgactccgtcgtcctaacgaactcgggtcctcaagttccgacgtcactcggtagtaatcggtgacgtgaggtcggatccaccgtctcgccctgggtcagagaatttttctttcttttcgtcttgcactcggtcaaaagtagttaaggatatgaaaaagaaaacgtacatgtgtatgtaaaattgaaatgtattactcaagccggacaaagtaaatagggagtctcgacccgaggtcactccagacattcccgttcgtatgaactaggggttacttcttactctctacgtttcgtgatttaataaagaaaagagtggtgtgtcgttctatctaaattacttgaattgtggaaaactaatcaccggaaaatttaataagggtgaaaggaaaccgtctacccataattcaagagtcctaaacaaatgtttattctgattgaagtagacataatcgagtcaaaaccatccggattaaggtaatagtgacggtaaaggaacaaaattctttagttttaaagaatcgaactttttgttaactttaacaatttttcaccttatcctctcggggcccccggacatattccttaaatgacttagggaccaaaagacatggaacaaaaaggaagacgtatctaaacgaattgacaaaaacaccgcacataaaaaaaaaaaagcgtcaaagcgagaacaacgggtccgacctcacgttaccgcgttagagtcgagtgacgttggagacagaggacccaagttcaataagaggacggagtcggagagctcatcgactctaatgtccgtacgcgctggtgcggtccgattaaaacataaaaatcatctctgccccaaagaggtacaaccagtccgaccagagtttgaggactggagtccactaagtgggcggagctggagggtttgacgaccctaatgtccgcactcggtggtgcggaccggtcgacaacaatattgacctcaagatacacgaacactggtaagaaccaaagaggcttataggatcttgaaaccaccgcgggataatatgtccaacaacttctttacaatggtacacctaactcatcctttgttaagagaaatagaaccgttataataccgtaccgtgatgaatttcatgtttaattttctccccctacgatgtcttgatcgactgtccgtgaaactatctccacctaaagagtcaagaattttatcgagaaatatttccttcggtctccgtaacacctcctcttaagaatgtattgagtatcccaatctggtgtaggctggaaaagacacaccgaagtaccgagagaaccaactctttcgtaatcaaagaggaaggtaatcaaagttggagaactaaagaactggggggatgatataaaacacgactcttgtgttcccataattgttgggtgtaacatctcctagcgagtcattatttctgacctcttattttacgtcgtacccttataaccgttaatgagtcaagatttaaagagaacctttactccctttcgtatgtcttatctcgaccttacttatcctattaaaaaaaaaaaaaacgattcaaccatcggtcttatattgtcgaggcgtgttgacatttacaggtgagaagttaggtgtacttcttttcccatttttataccaacttgagttggtgatcaacgggtaatcttgtctgaaagggtcacatgacgtaaagttatgaaaaagaaaatagagaaaagtctagaaggagtcttcttatccgaacaacaaaatgtcacaatcactaggtaagggaaactgctagggatccacctctaccccgtactcctaggaggtccccttttcgagtgatggtgacccgttgttgggatccagtcctccaagacagttctatgaaaggaccagggtctatccttctatttcagagtttttgttggtggtgtgcagttccacgcattcgacagggattttcgtattattcatcagaattaaaactaaaacaaaaggtcatatgtaacgtgaatcacaaagtgactccagcataagtagtaataagacgtatactaaaccatttttgtcgaaggattgattggacccttcgttgacccacactctaattgaccaatttcactactacatttctcccatcgcccaacgtacacaagcccacaaacctcaccctgatatcgtgcaccgtctccgaatgtcgattcaacaagaaaatcctcttgtacctgttgacagtgtagtcactgtaactagtgtacccgtttagtaagacaaggtacaccaggggtttcagagagaatttcggaatgtcttcttgaaacggttagtaaatgtatgaagtcctaccgaaccctacggtaccacatattatgttgttcactctccacacagaaaaatacgataccaacgactaactaccttcggcgtatttatgtttacctttggactgatttttaccgtgtttcaatagacagtagtccgtcctcgatttcttggtcctgggatgtaagagatccagtcacaaccctctccgactaatcgctcactcttaaccgtctatttccactggtaagccacgttatttaggacttgcatatccgaaacgggtcgtaagaagcatttatcacccatcgatatttaaagtactttataaaagtacccattcttgagaactttacaatattaactgatctttagagacatctaaatctttatctctcaatgattgtttaacaatctttcagatccttgatctttcgattcaactctcaatagatccttctagatagataacatgagtattagaaatctatttaagaggatcccggtcatcagatacacttaaaagaaaaagaagaagaagaagaagaaaaaaaaacataaaatcgacgttacaatttgttggatacacttaaaagaataacactcttataaacggaaggtctcactgagtggaaatagagtttctcgttataacactcaaaacttttacgacgagattccgacacaaaacaatcaggactcggtcctctgaatttcgtttgaactccccagaattttgtagcttcactcggaatttgtaacccttctggaatacaaaaagggagagtatagataataaaaacactagagtcaataattagtaaatttccctgagaaaggatcgactaaccgtgaattttgtcctaccttcagaaaaaaaaaaaaaaaaaaaaactctacctcaaaacgagaacaacgggtccgacctcacgttaccacgttagagtcgagtgacgttggagacggagggcccaagttcgctaagaggacggagtcggagggttcatcgaccctaatgtcagtacgtggtggtgcgggccgattaaaacataaaaattatctctgccacaaagaggtacaaccagtccgaccagagtttgaggactggagtccactaggcgggtggagttggagggtttcacgaccctaatacccgcactcggtggcgcgggccgtcaagaccagaaattgattccatattccgatactgaccatcaccacagagatcactgagtagttcactataaaccgttctgtaaaagggtaaatacggtcaaaggataagacaacttactcctttaaaagagagatttctggattttcaaaactgaaatatccaaagtttcaagacacctttgtaaaagataacgaataattaaacttagaatacattgagatcgtgtcatgagttataaataccgtaaatgtaccaaatagagtacaaaaaaatatcgagaagtaacaaggatagacggtttagtaatatgaaggatgttcgtcacgtctctcgactcagaagtcgtccaggttctttaaacttgtgtgacttccttcagtcggaagggtggacttctagttgtacggaccgtgagatcgtgaactcctatcgacttacttcattcaacaactacaacgtcaggacactcctagtgaagtcttgacaatattgtcgacaaaaaaccctcgaccacaacctaccccacacaaccagattacacttcaccccgatttacactctacctttctactggtcagaaggtataatgactgacccaagtgacttcgttgagtttctgtaataccagaagaatggtcaacatagtgtcttcttaaatcggaaacgaacacacaagatacagaagtgacatatccgggagacagtaagaatctcggaatttgcaactcttcgaattttgtggtaaagacgaaagacgactttcccattgggaaagagtagaggcaaacactctctgagacagcagtcaattctaatcacatttttcttttgatttgagacttcatcggtaatattttcacactcttacttcagtcaaaagatttctcaacccctttccactacgatttcctcccctaactcgttcaggatagtttctcggaaaatacttttatgaatcagtagacactgtagggtaaaccgagaaggtctttaggatcatttatcaacattgtcctacaattctccgtatgtaacacacaaaatttaggagacgatgagtaatccatatactggaaactgttgaatttcagagatctgaagagacaaacactcccaatttactttagtacatacatttcacgagtggataacgtcacggaccgtgtacagttcattttccattgggttcttctgagtattcaagtaaagggtgttatattcactggtgatcgtgatagtccatcgtccgtctcaaccgtacgaaaccaagatacattctttagggattccattttcaaatatttatcttctcgtagacacaaccataaccaccaacaataataacatcatgatattcatcataagcatcattgttatcaaataatattaatgattactgtgaaaaactaaaaaaaatagaaagacactacgaaaagtacggagaacacggggagtgacatagaacggagaagatgatgaatgaaggagacttacagacggaaacgaatagagaacgtgagttcacacataaagaaacagagaaagaaagaacagaaacgagaaacaagagatagatttcacacagaatgggtaaaggtacaaagagaacgattaaagaaagcacacacggaaacggagtaaaagagaaaaacaagtgttctcaccagacacagaacagaatctgtatagagagtaaaaagtaaaacaacgataaagagaaacgagaggatctacaccgagaagaaagtgcgaaataaagtacagaggaaaaacccagtgtacgacacacgaaaaacaggaaaagaacaagacagatggagaggaaagagacggatggagagaaaagagaaacacttgacactaataaacaatggggaaggggaagagcaagcaaaatttaaagtggaaaaaagactcagaccggaggaaagacgacaaagatgaaaaatagagtgtaaagagtaaagacgtaaaggaaagacggagagaacccgataagagagagaggaggggacgcacggagtcgtagagaacgacaaacactaaaagataaagtcataattagagacaaccgaacataaacaagagacgaagaagggaaagatgagtggaaactcataaagtcggagaagtacttagatagagggagagaaactaaagtacattagagaggaatttataaagaaacgtatacacccgttcacatgcacacacacacagtacacaccgtctccccgaaggattggggacggactatccacgtcttgcagccgatagtctcgttcgtaacacctcgccaaggaatacggtccgacggtacactctactaggttctggttttgttccgggatctgacgtcattttgggtcttgagttcatcccgtcttccaccttccgagtatacctatcttccgggtttcatattctgtctaccaaactctgaactctgggctcctgattctacctttcgggtacaaggttctatctatcttcggagtccggactttggttgttttcggagttctcggttcttttgtctcccaccggacttaacctggcttccggactcaacctaccttcagagttccgaactcaatcttcagaattctggaccctgtcctgtgtaccttccggattcttgactctgaacactgtgttccggttgctggattctaatcgggtcccaacatcgaccttctggatgttgggttcctaccttccggggacagtgtttcggatggatctacctatctcctgggttcgctttttccatagagttctgattgccggccttagacctccgggtactgggtcttgggtccttcctatcttcgaacttctggacccctttagggttctactcttgggatttgggatggagaaaagataacaaatgtgaagaatgagaatctataaaggtcaagaggacaaatagaaattcggactaagaaaactctacatgaaaaactacaacggccaatggaaatctaactgtcataatacggacccggtcagaactcggtcgaaatttagtgtcgaaaatggataaacaatccgatatcacaaaacatttgaagacaaagataagtgtagaagaggtgaactctctctgtggttttaggtcagtcatagattagaccgaaaacaattgaagggagtcctcgtctgtaagtatatccactatgacataaagtcaggaaagaaaactggggtcttcgggatctgactcttctattttaccagtccaacaaccccttttttttcacggtccgagagatctctttttacacttctctacgaggtccggttactcttcttaatctgttctttatgtgtctacacggtctgaagactcttcgtggacggtcgttgtcgaaggaagaaactcgaatccactcgtcctaagaccccaaaccctaaagatcactaccaatacctttcccactgacacggaccctgtttcgctccagggttcccctgtcggacttgagggacgagtatcatcaccggtttattaaaccacctgacacggttgcgatgaggacccaaattatgggtagagatccgaatttctactctcttggaccctgacaactcgtacaaattatgaaaggaactaaaaaaagaaggacaaatacacccttcaactaaatttactgactattacacatactttcgtgacattttgtattctctttttggttaatcacataaccgttagtacgtcaattgtaaactttcacgtcacatttaacacttcgtaatacatttagtccccaggtgtcaaaaagacattccccagtttagtatttatgaaatctgacacccggtataccaaagacaatgtataaacaaaaaatttgttgcaaaaatattccagttttagtaagaatcaaaaactcggttaacctaaaccggacgacaagtatcgaatggtgggggactacataataaacaataagtctcttttaaagacttatgatgatcaaaggaaaagacacggacagggacacgatccgtgatttttacgttactaataactatagatccactggacttttttttatcacttacacgaaacatttgacatttcgtgaacataagatgacactattcgcaacacctatgtttctttcctcgttcgtattttttcacgagaaagttttcctatatcatgatacgtctgtgttccttaacaaactatttacttatttaatatacatataaactccggttaaacacaaacgacgagaccattaaaactcatttttacgtcataaggtccatagtctttgcttttgtgtacctttgacgaaaatttgaaattttatatgacttttgtattccctgattcgaacaacaccagtggatattacacggtctatggtacgacccacgatctcgatggtttcccccttttcataagagtatcttgttttttaaagtctttccacgtataatttcacgaaacatttgatttcgtactatgtttacagttacccgatgtataaatacttacttacttacctacttacttataattcacggagaatgtatggtcgataaaacccatgacattttatgttctaattaagaggatacattattctcctttcaaataggagatatgataagtctacattccttactatataacgaattaaaatttgttagttctgaaatgaccactccaattcaatttaataatgactatgtaaaaaggtccattggtcctttctcgatcatactcctttacttcattatctacactctaggtctggctttcagtgaattaagtcgaacgcttacacgaaagatttaatatttcgtgaacatttactttttaaactacgaaagacatacttattttgaaagacattcgatccataacagagatgttttaagagtaacatatcaatttggtgtcactcttcccaagatattcatcaatatgtttggttcccaaatttatggacaatttatctagttaaaactaacggatgatacacttgagtgacaatttccgtgacttttaaatagtataaagtaaatcggtgtcggtttttattccgttatggatacaatcgtaaaacacttgagattccgtggtatatttacattgacaactaaaagagtgaaccacgacccatgatccaaatattttaacatactatcaataatataacacgtttatttcatccttttaaacttattgttactaatagaaaacttatgcgtatgcgttccctaaccaacagacttcttacggtgatatcatcaatagataacacacggttagagtaacgatccgtaacccctacgtttctatttggtagaaataacacagaacccatcgtcttcttttatacacattttagttaaatattaaacatttgacggtgggtatatattcgatatagacgacttactagtaactaatgagaataggaatctctattgttgacccccgtgtttgtaaataatagtaataacttggatgttgtctctagatacacatctaaatgtttcggatgtcaagatatgtctatccttacttgataaccgaatgacttaccactaatgaaagacaccccgagccttgatgtacgggatcctatatttttactacaatagtaatatctcacgagtgtcttcctttacttcattatatccacactctaggtctggttttcagtaaattgttcaaataagtcactacttttgtaccctgtttacctgattatattccgtcacatgattcgactcatctctctatttcaggacaggtcttctatgtacgaaggaccggactaactcctctaccttttaaaaacgttttttgttccacaacaccagaaggtaggtcaaagaattcacgactactattttcacttaatctgggtggaactggaccggatgtcttcatttcctcatttttatttacggagtccgcacgaaaaactaagtaaactatttgtttcgtagaaaatacaccttatatggtaagacccaggactcctattctctctactcccgtaatctagtgactgtcgacttctatcttcttgtagaaaccaaactaacaaatttattataaagttacggataagagacgttccatgatacaaagcatttaatttatccagaccgggtcttctgggtgagttaacggaaactctaatttttttttttttttttctttctttttacgttcaaagaaagttttatttctctgtaaaaaggatcaaagtccttagggggtttagtgaaggagtaaccgaatcaaatttcggtcctctgactattttcccgagtcccaaacaagaaattaagtaattgatttgtaagacgaaaataatgtcaatttaccaagttctacattgttgatcaaaatttccataaacgagtaaccagaccgaatctctgtccttctgtatactcgttattttttttctaagaaaacgtaaatggttaaatcatttttaaataattttgacttatttcacgacaagaattcacgaactttctgcatttggtttcacgtgaaatagagtaaatagaataccacctttgtgtccttgtttaagagattctctgacacaaagaaatcaactcttctttgaagtaactcatcgacactatacaagctatgattcctttttgatttgtctagtggaaactgtacgcaacatctcacccttattctctcccgaaaaataaaaaagcaagtatgctcataactacttctactatgatttacgatttactttatatagacgaggttttccgtaaataagactgaacctctacgttgtttttgtgtttttaccttacttcactatgagaagtagtttgtcttcactgacaatagagttggtaaaacaatttaggatttgtcttttgttttttttagtactgcttttctgtgaacgaataattaaccgaacctttcatcttatatcctctttccaatgacaaataaaaaaaagtacataagtaagtaagatgtttatataagcccacggttatccatgaaccatattccaaaaaccggggtctctgtaccctttttttacgtacggaagggtctcttacggattatgaaaggaaaaccgaacaaaagaacaatccccgtaccgaatcagggatttattgtaacacaccaaattaaggatgaggcatagagaagatggtgagaccggtgatgctattcgtccatcgacccaaaacatcactcgaacgaggaattcaatgtccttgagaggaatattatctgtgaagtaaaaggatcaggtagggagtactttttactgactggtgacgacccgtcgtcctccctactactggttgattaagggtttggggtcagagtaaccatggtcggaaccccttggtggatgtgaactcggtgttaaccaaaacttcacgtaaatgttccaaacagataaaagtcaagaaatgaaaaatgtacgactgtgtatgtatgtgacggatttatctagagaaagtctttgttaggagtctattgcgtatcgttttacctctacctctgtactaaagagtacgttgtcgaagagattaatatggaatctttacaagaggaaaaatagtagtttagacgagttcttcccgaaaaatatcatcttattatagtcacctacttttgtcgaattgtaaaatggtacgaattcaaaattcttattttatttttaacctttattaaccggttttaactttcctttttaaaaaaattttaaagagatttacatccggaccgacccgaaactggaaaaggcaaaaatttagtgagtgtctcccaccctgtcctccttctcacttccttttccagtttggacaaaattcccgttggacggaaacaagacttaaccagaattcttgtaatggtcgaggtccaaatttaacaagtcaaagtacgtcaaggttatcgactagtaacaactctactcctgttttaggaaacaggagtgatcaaacgaaatgtaaaaacttttcataataaaaacaggttcacgaatagttgatttggaacacaatccattcttaccttaaataattcacttagtcacactgggaagaacagtattctaatagaatttcgacttcggttttatacgaagttttcttctcctgaaataacaagtaacatcaagtatgtaagtttcgtagacttgacatcaaagatatcgttcggttaatgtaggtattcacctcttcctttatctatttacagtttcatactaaccacctccctcgttccaacttctattagaccccaactttaaaagatcaaaagtaagacatgtaaaaatcaatctgtagtctaaactttataattacaaatggaaagttacacaccatagtcgacctgagtcattgtggggaaagaagtcgacccctaccccttacctaataaccttttacctttcttctttcattgattttcggaaggaaagtgtcaaagaccgtagtgatggtgatgactaatttgttcttattctcttgtaaaatagtagtagacgaaataagtgtatttacttcaacactacttatttagacgaaaatacgtctgtgttccttaattcaccgaagcagtaacaggaagatggagtttctattaaataaggttttcgattctatttaccttctgagaacttgaacacttgactacactttacgtcttagagaaaactcagaaacgacaaaccttctaactttttataacaagtcgtacccactggtggtctttcattagaattcggtagatctacagtgttaactttgtttgacccctcaaccaacgataacattttattttatatgacaaaac

SEQ ID NO: 36 - DNA, 60401 bp, Homo sapien
tacctgcattaatgtgaatagacatcaatgataaacagaataatgccccataaagatgtctacactgtaatctccaaaacttataactatactatatcacatggcaagagggaattaaggttactaatcagctgaccttgagatgggagattctcctggtttgtatgggtgggcccaatgtaatcacagggtccttataaatggaaaaggcagacaggagattcagtgtcagactgatacaatgagggaaagactaccagcagttgatggctttgaagatagaagaagggggccatgagccaagaaatgtgagtagcctctagaagctgaaaaaggcaagaaaacggattcttccctagaatctccagaaatgcagccctgccaacatggtgattttaactcaatgagatgcattttagacttctgacatctagaattgtgttattttcagccctcaagtttgtggtaatttgttacagcagcattaagaaaatgtacaatgaccatgtgcagtgcctcatgcttgtaatcccagcactttgggaggccaaggtgggtggatcgcttgagtccaagagttcgagaccagcctgggaaacatggtgaaaccttgtctctacaaaaacacaaaaattagcctggtgtggttgtgtggacctgtagtcccagctactctggaggctgaggtgggaggatggcttaaacccataaggtggagattacaatgagccaagatcatgccactgcactccagcctggacagtagagccagaacttctctcaaaaaaataaaaaagaaagaaactatacaatgctcctgtgattctagtgctatgtacatatatcctttatagggaattaaggaggttatagacacaaccagaagaggaggcatggaatagactaatgtataatggataggaaagtgtatcttttacaacttctctgtaaaaacaccttcacctactttatgagtttgcctcagctgccataacaaaatatcagaccaagtggcttaaataacaatttattttctcacagttctggaggctagaagtctaagatgaaagtgccagcaagtttgatttctggtgaagtctctcttccttgcttgccaatggccgctttctcactgtgtcttcaaatgtccttcctctgagtatgtgaggagagagaggtttgatgcctcttcaccttcttataaggacaccagtcctactggattagggctccacccttatgacctcatttaaccttaattacctccttaaaggttctatctccaaatacagtcacatttggagtcagacctacaacatatgaattttgagaggacacaattcagtctataacacctagatggaaggcaatttcatataaagatgatatgcagtctatgacagcaaagtagctagtggaaatcacaacccctaattctatttttatgtcattccctaagtccaggtcccatgtggatatagcattgttcagggctatctctttgctgttctttttttttttttagactcacacaagcaatgtggagaaggaacatgaaaacatctttgagatagagcttaatacagatgtcaatctctttgtaaataagcaattaaaagtggaaccactgtccaccatgtgagaagagtgactggctatggctggatatttttaaatacacataaaatgtggtataaatggtagaatgccagggatagaaggagtatcttataagttacctagtcaacgttctggcttctgggcagaaaactatctaaactcagccagataatcagtttcaactaaatcaggaaaacatggaatcatctttatctaggtagtgttatagttacattgcctcatttatctacacatcaataaattctttctcattgctaatatttatcattcttatcatagtataagcaaatgttttaattctattatggtaaagataaagcttctgtaattaaaacactttaatctggaaagacagcagtaaacccttcaagcaaaagcccaagtaggttcaaaaataatagccagagaggttaaaggtaaaccaatagagtgatatgttacagcaactaagggagagaggcaggagttttttaaaagagagaagaggaattataacaacagaaacaggttagccagctgccagtttagatgagcataatgagtcccttagatagatcattggtgatttttatcaaaacactatcggtggagttgtgggagtggtaggctgactatagtggattggggaattaaatagtgatgaacccaaaacagaaagtctgaagaaattccctttgagccaaaaaaaaaaaaggccgggtgcagtggctcacacccataatcccagcactttgggaggccgaggtgggaggatcacctgaggtcaggagttcaagacaagcctggccaacatggtgactctactaaacattgtctctactaaaagatacaaaaattagccggaagtggtggcaggcaacttaatcccagctacttgggaggcagaggcaggagaattgtttgaacccgggaggtggaggttgcactgagctgagatcgagccattgcactcaaacctgggggacaagagggagacttctctaaaaaaaaaaaattccctttgagcatctctactgtagagatgaaataagagagaagtggattctttagtatagagatggaaaggtatggagctagaacatgtgggttgtgaacagtggctaactaaaccaggaccagtaacctagatatcacattgggcttaattgctgggttattcattcattcaggcaacatgtatttgttgagagcctgaatgtgccaggtaatagaaacacaaaggtggttaaaatagaccttggcctctgtcttcaggaagcttccagtctgaagagggatgaagacatatattaatcaaacaatcccacaaatgcaggtataatctgcataaactgacaaatatatctactttggagtcaagaaattaagagaaatcactgatgtgatcagtgaacaagtaagatttattaggaagatggaaggatgacattacttcaaatatattacaggaaaccccaaccatggtaacaacatcaggcctatctttacatatgtttaataatgcttaacttcacttttgctcctatcctccccaaagcaatcttcaagttcttctgtatctttgttttattttctttgttcttttttgtctcatttcctatactgtttttattccatactttgacagttcagtgaactcctttgatagatcccaagtcctcctttttcaatatttacacttataatcatttttgatcactccaaaactgagaactttgagtgtagattttctaggcttcttattttatttttagacattatatagaaaaattagagggaagggaaaagaaggatggcaacatggtaactgggacagtgttcaaaaggtctaagtcctacttctcactccatacaaattatctgcaatttttttatttttgagacaggctcttatctctcacctgggctagagtgcagtggcacaatcatagctcactataaccttgaactccagggctcaagggatccttccatttcggcctcccgagtagttaggactacaggtgtgtgccactacacacagctagtttttaatttttttttattttcatagacacagggtctcactatgttgctcaaactggtcttgaactcctggccccaagcaatcctcctgccttggcctcccaaagttctagaattgttacaggaaagaggtcccaatccaggcccaaagagattttatttatgtactagtgtggagcctagcctaggacacatcaagcagaagtgcagataaggtctgactctttccagtacagctagggtgcctggctctccacatgtccccagaccttatctagaatctaatgtctccaaggtaggtacattgaataattttcaaaagtcaaggaagcagtttatgaccttaaagtagttagcaaacttaatatctgacctgactaatttagaccaaatgtttacatttttgaagatatttttattttatcagtaatctttaaaactattttctattttccaaagattacttaagtcaaatgaactaaaaggcattatacattttagttttctgatgaaatatctgatttaagcacttattatttttgaaccaattaaagcttttttatatcacacacacaacacatataaatacacagacaggctgggtgcagtggctcacacttgtaatcccagcactttgggtggccaaggcaggcggatcacgtgaggtcaggagtttgagagcagcctggtcaatgtggtaaaaccccatctccactaaaaatacaaaaattagctgggcatggtggaggatgcctgtaatcccagctactcaggaggctgaggcaggaggatagcttgaacccaggaggtagaggttgcagtgagccaagattgtgccactgcactccaggctgggtgacagagggagaccctgtctcaaaaaattaataaataaatacacagaagaagataaaggacttatcccctaaggcaggaatcaaaccctgaacacaggccaccattgtgaaaagaaaaagcacagccacatggttacaaggtcaagctcccaaggacatacaaaacaagaaggaaacctcatccagttttttcagggacctgcagcaaagtttgtacctgataaatttactgggccatcttgaacagcaggtttacaggtgtcctaagctcatgttctatcctaagatacccctctttatgacagaacaatacagaaagacacacaacagatttgctacaacttaagactagcctcataaatccattttttcactaatcaaaactttacagaggaaatgaacagtgatttttgccatccattcaaccagttttatagagagagagagaggaaagcattgcctgaggcagggtggggaaggcccggcactccgagtgccagagaaagccccacccattgcagcaacactgaaaagttcatgcagctgcttgtcagtcatgaacggattttttccagcagtcccatcagctctcatttccctttttaggagggaaaagctccccatgttctacaatcctctacatgcctaattctgtcaaccatagccatcagcaaagagtgcaaggcagatcaatccaaagagaatagcggttaacatcctataatgccaaacctgttcttagccgaaagggactttaaggagagggactttactgagagggacctctaaccccctaaatcttaaaagggactctaatcctcctaagttgggcctctaacccagtgtcagtcaagcatccttgccttttattgagaggaagctttaaccctctcttacgagagactctaactcccctaagttgagctataaccaatcccatcctttgcctgagtaccccaccacttacccaaagttgtccaattagtaatgctgcagtctatttcctttgtgctgggggtctcctcagtatcatcccttcgagtttcaccagaaagatgttatcaggccccaccacttacccaaagttagcctttggattgggggtttctgcattatagtcacttcagtggttgccaaaaagatgttataggacccccaacacttacccaaaattaacctttgggtcaggtatttctgcactatagtcccttctgtgataatcagaaagatgttataggaaaaggatcctgatccaggcccccaggagagggttcttggatcttgtgcaagaaagaattcagggcgagtccgcagtgcaaagcaaaaccaagtttattaggaaagtaaaggagtaacagaatggctactccatagacagagtaaccccaagggctgctggttgcccatttttgtgtttttttcttgatgatatactaaacaaggggtggattgttcatgccttcccattttagaccatatagggtaacttcctgacattgccatggcatttgtaaactgtcatggtgctgatgggaatgtagcagtgaggatggccacactaatgtgttttaagccttttcctcagccaaactacaaaaaagcaaaaattactttgtttcaatattacccctactggctaacacactagcaggtcatcagaatatttgccattcctacaaaattccaagattctgtgatgatcctttgagtataagaatcacagagatacacacaattgttacatgctctatttaagttttctatgttatattttctctttataccccccaccccatttcctgactctttctttttaaagggtctttgggatcatgaaagcaaaatgcagcatcctcagtgtcacacacgtccatgtgaagagaccaccaaacaggctttgtgtgagcaataaagctttttaataacctgggtgcgggcaggctgagtctgaaaagagagtcagcaaagggagataggggtggggcagttttataggatttgggtaggtagtggaaaattactgtcaaagggggttgttctctggcgggcaggggtggaggacacaaggtgctcagtgggggagcttctgagccaggagaatgaatttcacaaatgtcatcagctaaggcaggaaccagccattttcacttattttgtgattcttcagttgcttcaggccatctggatgtatacatgcaggcttgggctcagaggcctgacattcctgtctttttatattaataagaaaaataaaacaaaatagtgttgaagtgttggggcggtgaaaaattttttggggggtggtatggagagttactgggtgatgtttcttagggttgctttgagtgggattaggggtggcgtgggaacctagagtgggagagataaagctgaaggaagattttgtggtaaggggtgatattgtggatttgttagaaggaatatttgtcacatagaatgattggtgatggcctggatacagttttgtatgaattgagaaactaaacagaagacacaaggtcccaataacagaaggagaaaaacaggtattaaaggactaagaattgggaggactcaggacatccaatcagagtgcctaagggggttcagcgtgattattttcttggttgatgagtttttgggctctatccttgagtttttttatgttgtcatataccaagccagattgatttaggtaaaaacaacacttttcatttaaaaatacacacagtcccctttttttgagcagtaagtcaaggcctcagtgattttggaggaaagagaaatgcaaagccagcaatcattttttaaagaaggattagaaacagctaggagagagtgaatgagattgatagtgtggtggagatagctggggagaggtagagggtcgcataagaacaggaatgagaataagagtgaatataaaggtaaagaataggactttattagggtgaaagtattggagtgtaccttgtcactgaagatcttctatccacttcaagagagacttaaggaaggtggtttgaggtaaaaccaggagatatgagttatgatggtttggaggaaaagtgtaaactggcagtgtaaacaagggcagggcatttacgagtagttgagaatggtgaataggagtatgactagacagaagatagtagggatgacaagttttggggttgcagtccaagtagtgggggtgactgcataaagccttgttgcaataagtagggtaataaacttaatagaatgaaaggatgttttaggctcataagggttactactgttcttcagaaatgtgagtgagtttaagggaagtagggttgagtacttgcaacttctaggaggaagaggagagattaggctggctgtccaatggacacagctttattctggaatggtgagcctaatagggagggtcttacaggcggatggcagttggggtattatagatgactaagtagggtccggtctatcaaggttatagagtttgaggggtcagattcttaacaagaactgatcgtccatctagggtgtctttatatggctgggaatatggagtaggcaagaaaagattagcagcttggcaaatttcctgtcttgcctgctggaggaccagcagatagattcctagaggactggtgtctgagacgaggttggggccaagcaagaaagtgtgtctatataaaagtttaaatggactgtaccctctagcatctcaaggacaggctctaattctgagaaaggcaagaggtaaaagtactgtccaatcttttttaagttggaggctgagcttggtgagatgtgtctttaaaagaccattagtccattctacctctcctgaagattgagaatggtaaggggtatgaaggttccactgaataccaagagcctgagaaactgcttgggtgatttgactaataaaggccggtccattatcagactgtatagaggtgggaaggccaagcctaggaattatgtctgaaagaagggaagaaatgactatggtggccttctcagaccctgtgggaaagtcctctacccatccaatgaaagtgtctacccagaccaagaggtattttagtttcctgactcggggcatgtgagtaaagtcaatttgccagtcctgggcagggcaaattctcgagcttgatgtgtagggaagggagggggcctgaggaattcctgagtagtagtagtatagcagatgggacagagaagtgatttttttaggatagatttttacaaaggaaaggaaatgagaggttttaagaggcaggatagcagcttgcaacttacatggaaggggttacaaaatgacaacagaatagaataggcctgtgaggctggaaggagatattttccttgttccaagaaccatttgccttgtgtggaaagagattgataggtggaagtttcagtgggagagtaggtgggagtgacagatgagaaggagaaaaactggccatgagggacagaagttgggacactagctgcttctttagctaccttatcagcataagcactgtcctgagtgatgggatctgatgccttttgatggcccttggagtgaatgactccagcttcctttggaagtaaagtggccttgagaagagtttttattaaagaggcattaatgatggaggacacttgcatagcgaggaaacctcttttagcctacataacagcatggtggtgcaggatatggaaggcatatttagagtcagtataaatattgatgtgtagtccctttgcaagagtgagagcctgagttaaggcaatgagtttggcttgctgacaggtagtggaggtggacagagtggtaacatcaaggatagatgtggaagatactatagcatagcctgcctttgctaatgagtgacaattaggcctgatggaactgccatcaataaaccaagtgtgatcagggtgaggaacaggaaagaatgaaatatgggtaaatggagtgaatgtcaggtagatcagaaagatacagtcatgggggtcaggtgtggtatcaggaataatgtgggagccagcctaaaacagtaagatcaagttgcttggacagaaaggctacaggtcatggtcctggctcttgtgtaagaattctgaccgcacagccctgcacttcagctgtgtgtaatgaaaaagggttcagatgagttagggagagctagtgtgggagcagcttccagggctgttttaagaaatggaaaaaggagtggggaaaggatttaggatctatggggtcagctaggttttcttttgtgagtttatataatggtttagtcaggacagtaaagctaggtatttaaaggcaaaagtactgaaccatgctcaggaaagaaaggagttgttgctttgtcaagggggttggggtttgggagattagccagacacgatcagcagggagagcatgtgtgtttttatgaagaattatgtcaagatatataacggatgaggaagaaatttgggctttggaggcagatgtgcaatgtccttttgagaatagattgttggagcagcaggagggtgtcctgttgggaagatttgtaggaggggctataaagtagaaggtcatcaaaatatttaataaggtgagatgtagatggatggaaagagagtaaatcatgagaaagggcctgactgaagtaataggagctgtccctgaagccttgcagcagtacagcccaggtaagttgctgagactgatgggtgtcagggtcagtccaggtaaaagtaaagagggccttggaggaagggtgcaaaggaatagtaaagaaagcatatttgagatccagaacataataatgggttgtggaggggttgtgaagggaggtattaagaataagagagtatatgggtttggcaccatggggtggataggcaaacaatttggttgataaggtgcagatcctgaactaacctgtaagacttgtccggtttttggacaggtaaaatgggagaattgtaaggagagtttataggcttcagaagctcatgctgcagcaggcgagtgataacaggctttaacctttttaaagcatgttgtgggatgggatattggcattgagcggggtaagggtgattgtgttttaatgggatgctaaggggtgcatgatcggtccccaaggagggagtaaaggtgtcctatacttgtggattaaggtggggagatacaaggggaggatgcgaaggaggctttgaactggggaaaaggcggcaatgaggtgtggctgtagtccaggaatagccagggaagtagataatttggttaaaatgtcttggcctaataagagaactgggcaggtgggaataactgaaaaagagtgcataaaagaatgttgtccaagttggcaccagagtgggagagttttaaggggttttgaagcttggccgtcaatacccacaaccgttatgggggcaagggaaacaggcccttgaaaggaaggtaatgtggagtgggtagcctccatattgattaagaaggggatggacttaccttccactgtaagagttacctaaagtgtctgtgatggtccaggaggcttctgaggtgatcaggcagcgtcagtctccagctgctaagccaagcagatctgggaaagtgtcagtcagagagccttggaccagagctttaggggctgtaggagtagctgccaggtgagttggacaatcctatttccagtggggtcctgcatagatgggacatggcttacgaggaatcccaggctgcagcattccttggcccagtggccagatttccagcgtgtgaagcaagatcctgggggaggaggtctggaaggaatgcctgactgctgtggcttaggtgctatgaagttcttgtgtgctggagatgtggctggggtttctctcacagtggaggcaagtaattgcaactcttctctattattgtacaccttgcaggtgaggttgattaattcctgttgtggggtttgagggctggagtctaatttttggagctttttctaatgtcaggagctgactgggtgataaaatgcatattgagaatgagacggccttctgacccttctgggtctagctagggtggtaaagtgtctaagggttgttgccaaatgggccatgaactgggctgggtttttatatatgatgaaaaagagcctaaacactaactgatttgggagaggtcagctaaagaaaaaggagcattaaccttgactatgccttcagcttcagccacctctgtaagaggaaactgttgggtagatgggggagggctagccacagaacgcaactgtaagctggaccaggtgtgaggaggggaggtgatagaaggattatagggtgggagagcagaggctgaggaaaaattgggacctggctcagcctggtgaggagcagcctggggaggaggggagaggtcagatgggtctgtagaaaaggaggattcaaaggactcagagcttggggtggagactgaaggaagagacaggagagaaagaagaaagatttgggatgagtcacattgggagcagagattaggaaaagacttgttgcaggaagtcagggaccccaaatggagggaccggctgaagccatggcagaagaatgtggattgtgaagattttatggacatttattagttccccaaattaatacttttgtaatttcttatgcctgtctttattgcaatctctaaacataaattgtaaagatttcatggacacttatcacttccccaatcaatacccttgtgatttcctatgcctgtctttaatttaatctcaatcttgtcagttgaggaggatgtatattgtctcaggaccctgtaataattgcattaactacacaaattgtacagcatgtgtgtttgagcaatatgaaatgtgggcaccctgaaaaatgaacaggataacagcaattgttcagggaataagacagataaccttaaactctgactgccggtgagctgggcagaacagagccatacttctcttctttcaaaagcaaatgggagaaatatcgctgaattctttttctcagcatgggatatccctgagaaagagaatgcgcacctaggggtaggtctctgaactggcccccctggggcgtacctgtctcttatggttgagactgcaggggtgaaataaactccagtctcccatagcgctcccaggcttattagaaaaaggaaattcccacctaataaattttggtcagaccggttgatctcaaaaccctgtctcctgataagatattatcaatgacagtggtgccctaaacttcgttagcaattttaatttcaccttggtcctgtggtcctgtgatctcaccctgcctccacttgccttgtgatattctattaccctgttaagtacttgatgtctgtcacccacacctattcgcacactccctccccttctgaaaatccctaataaaaacttgctggtttttgtggcttgtggggcatcacagatcctaccgatgtgtgatgtctcccccagatgcccagctttaaaatttatctcttttgtactctgtccttttatttctcaagccagtcaatgcttagggaaatagaaaagaacctacgtgattatcagggcaggtcccccgatagggactgatgtgcaaaagaattcctggatatcaggcacctcagaccatttgcccattttacgacaagaattatctagatcttgtaggatggagaaatcgaaagtgctgttttctggctatttggaaccattgtcaagtttgtattggggtcaagtggtattgcagaagaaaataagatgtttaggttttaggtcaggtgtgagttgaagaggttttaagttattgagaacacagtctaagggtgaagatggaggaatggagggtggaagtttgcctatagtgaaggaggcaagccctgagaaaagagagggtagagacacggagagaaggggtggggggtacttgcctcccggggaggtggtgcttgccaccaaggtgaaggatcaaggcaggcatccccatggtgatcagacacctctgaaatgtgggtgaataatcaggcaggcatccccgcagtgattaaacactgagggaagactgtcttcccgagaccatgaccatcgtcagagttttgggttcacacataaaacatgtctcctctgtctctaccagaaaaggaaaggcactgaaattaagggaagggagagattgaagggtagcacagaaattgaaaggagaaagaggttgagggatagtgaaagaagttggagaagagagcaaaaagaggctgcttaccagatttaaaattggtgagatgttccttgggctggttggtctgaggaccagaggtcataggtggatctttctcacggagcaaagaacaggaggacaggggattgatctcccaagggaagtcccctgatctgagttatggcaccaaatgtcacgtgcatccgtgggaagagaccaccaaacaggctttgtgtgagcaataaagctttttaatcacctgggtgcaggcgggctgagtctgaaaagaaagtcagcaaagggagatagggatggggcagttttataggatttgggtaggtagtggaaaattacaatcaaagggagttgttctctggcaggcaggggtagtggtcacaaggtgctcagtgggggagcttctgagccaggagaaggaatttcacaaggtaatgtcatcagttaaggcaggaatcggccattttcacttcttttgtgattcttcagttgcttcaggccatctggatgtatatgtgcaggcttgggctcagaggcctgacactcagcagctactaccaccattggcaccactggcaccactgccaccaccccactgcaccccagttgcttcactctccatcacagaagccttttcagcaacagccaacatttgtaccctcaccaagccctctgattttcccaatcacaaggccttcactacaatattttcttcattcacaagtgtcacctattctccatccccaaggtaagtcaattctaattttcttgcaagggttgacagaggtaaaacctgtccagataccccaaaggtgtttcatcttggcaattcttgactctttcaaggaaataagaatagtcaaatataactaagtaaaataaataagaatatataaggtctgtaaaccaaaaatgaaattctaagccccccaaccaactgaatggacccctcctctcagccaagggcattctaaagttaacctgaaagactaattcaggccatgatggaagtgggtggtcaggcatgcctcattatatcctcctccctttggaatttagacacaaatgaccaacattaacattaaaacagagaccttaagattgacaaagtagactctttgtagcaataagatatgaacacaacagatagcaggccccaaaatatatttattcaacatatttttaaatggccctgcaaagctgtctcttgtggggaaacctacattctgtagagaatgcccttccctttccagatcttttcgcttatccaggagagaattaactaagagtctggtacctttttaagtctgataagaaacatttacaatctattctctctgaagcctcctacctggaggcttcatctgcataagagccttagtctcagaagccccttatgttaatgcagatactcccttctattgatttcaagactttaatcagaaaacctctgagtcttcctatgacctggaagcccccacttagagttgtcccacattttcagacccaaccaatgtacatcttacatgcattgattgatgtcttatgtttccctaaaatgtataaaaccaagctgtagcctgactactttgggtacatgttctcaggtctcttggagctgtgtcatgagctattggtcactcatatttacttggctcagaataaatctcttcaaatattttatagagtttgactctctgttgacaagtcctagttttaaaacagtttttatttcatttatttattttgagatggggtcttccctctgtcacccatgttggagtgcagtggcacaatctcagctcactgtaacctctgcctcccaggctcaggtcatcctgccacctcagtctcccaagtagttagaaccacatacgtgtgccaccatgtccagctaattttttgtatttttgatagagatggggtttctccattttgcccaggctggtctcaaactctctaagctcaggcaatccacctgcctcagcctcccaaaatgctgggactacaggcatgacccacagcgcccaaccaaaatgacttgtttttagacaagaggttagaaattttttttcctcaaagggccagacaataagtagattaggccagggtttctcaacctcaacagtattcacattttgggccagataattctttgttgtggagtgctttccttttcactgtagggtatttaactgcatccctgacttctactccctaggtgccaataacatcttattctcagttgtgacaataaaaacattttccagacatttctagatgtcccataggaggtaaaattgccctgaggtgagaataactggtatagactttgcattccatatgctatctgtcacaactactcagcagtgccattatagcacaaaagcagccatagacaatatgaaaatgaatggacatggtactttcccaataagtactatggaaactgaaatttaaatttcatataattttcacatgtaataaaatattcctttaaaaatttaagcatttagagatggaaaacccattgttagcttgtgggacaaacaaaaacaggtggtaagccatagctttccaactcctatttgttttatttttgaaagtttaataatatatgtaatttaaactactgtatccaaataatattattttaacatgtggtaattataaaaatcaattcataaattcagtatgtattttacatttataatacatctcaatttgtactagccacattttaagtactcaatagtcatatatggctagtagctaccatattgggccatgatgccctagagtatttgcttttaattattaggcatacttcctctcaagaggccctagtcattgggaacatgaggtcactttctctttgaaggtaaaagcctctaagtcctgttattgatctaaactcacacaaaaaaaaaaaaaactgaaagtaaggtttaaaagaccaccatgacaatatttatccaatttgtgactgtatttctgattggcaattcaaaattttgtttggcttagtaatttttcttgctatcttgaatagaattaatcccagaaggtctggtagacaatgagtgttttggtgtaactgggtttctttatgtacaaagctacagaattccccttgaagacactggccttgacatccctgaaatagcaaaatagacttttttgtttactccacgtgtagtatatgacagttagtgcattgtagatagggccatctattgaaatctacatgtgattatactctatcgaacatctactttaaaacagcaaacatgagagcctacaattgacatctcactgtttaaaaaaaacaatttcacatatatattcacaaacatactaaagtggtcaatattcaaagtaaagactcagatattcctcactttgcaccatggtttagttaaataatacaagtaccccaacaacacagtttaaatttcagttaccatggtatattgactgtgatattaaataaagtacaaatttcactgctaggttttcagtatgtaaattactatataactaacagatgtgcatcatgatcaattatgaatcacatcacttctttcacagtctttggtgactggtcacttatcagctattcagtacatgtgcagagaacaaaccatgtgtttgtgttgcctctttgtctgccagtgataaacccaagtgacatttaacaaaaacatataatgaaagagggaattggccaataaaaatgaaagctcaagaaagaaactaaagtcacaatgctggaaatgaaattcaaatcaaaggtaaatgaagttatagaggaaacagctgactgtgggaatgttgacactttcactggttggaaaggctatatagatatgaagccaaaggaacttagttaaagcagacattgacataaatgaggaatttggttgtgacaagcaatgcctattttagaccaatggcttgtatcctcattagggactgtcagtataccaaaagaatgggtgttaagtctaggaaaattataatcatcattaagttgacttttagttcccaagatttcctataattactgttttcagtatttagatattactgctaatggtaaaatggcctatgagtagaaaatatgaaatttacatttctctttatccaaatttcctagtggaaccctgcccctaacaatgtttaccacttcttactgtccattttcacagatatgggggacatgattacatgccctcaacccatatgttttctaggtaactctaccacagaataaagcggtactcaaattactctcagcttgcttaatatccactttaggacactgaaaaacaaacacaaagggactaaacaagatgaacagtacgtatcccatttcttttaagtccactatcttgatatcatgaggccccctcactggttttatgtagatgggctactggaatgcataagctagtgccaattcttattttccaaagatgttaaaagattaacataggatgggaggagagtgaggatcaaaaaatctacctatcaggtactatgctcactaccagtgtaatgaaatcatttgtacatcaaagcccatgacacacaatttacccatggaaatttacccattggcttttgctgcaaaagtaccccttgaacctaaaataaaagttggaagaaaaaaacttaacatagcaaattcttagacattgttctgacttgtttgcaagacctatgctttcttcctaagctggtgctggatagttcttttgacttttttcattattgatcttctctctccctagcattgccaccaagggaaactatttcatgtaagacattcttttccatccagccatctggttggccctaatttctctgagcacatctttcccacctgtattgtgaaccatagagcaggcctaagggaaggttataaagaaggtaaggttggtctgtattgtctcagtctcttttaatatctattcccttctgtatggtactccttcttctcagagactcctgttctctagcttcttcataatcggctttcaaaataggatctgctgtcagcgatttatccctttagtgctaggatggtaaataaattttatcttgcatgccaactctaaattattagtagcagccacctgaaatgctacgtgaaggattctggggatgcatccagttgaattagttatgagaagaaaaattggctactataggaaagagaatcaacaattcaatggattaaacaaaaagagtgttaattatttcttacatgacagtatcaatgtaaaaagttcaaatcagagagggaattctgtttcttagtcattcagggacttgatttccttccaagtcattgtactttcatctcatagggaatcactcccatctgtatactgaaactgggtagccattacatctgagttgcagctggtgggagaaagtatggaaaggagagcataccctatgtcttaggacccaggcatggaaatggcatacatcacttctactcacattttattgatcataacaatcatttggctgcacagaactgcaaaagaagctgaaaaatgtaccctagctgggcagccacacatcaagcaagaatgggagaatgtattttggtgggcaacgagcatttttgtcccttactaggcttaacaggaatcaatgctatgattaattaatgaaattttccacgagttggaaaaaaactgtggcatccacccatattatggtattagctgatcttgccttaagtgtgaaatggaagtcttgttttctttcctagagggtcctgaagtttaaatataattccaaaaaatttgacaggcattttccactatgagaaaggtacttttgttaggtacaaaaataaacttgtccctgctttatcacttaatgtagaatcaaagattcgtctccagataacagaatttcagacatcagctaccaaggagggaaaatataggcttgggaaagaaggccttcttgtatgaaatcacaccacacaggcactagacagctctacttatataaagtttagctctataaaaatgagattggggtgtttcagagattttattaggaaatgtacagagaaaacagttgatggggcaaaagctataaacactaaggtgagaaggaatcagaatataggcaagagttatagaagcatctaaatggcatttgtatctgtttaatcagcctatcaggtaaatctgcccacttttctccctaccagtgaacatctgttttgaacctctaggatatgggacctcttgcttgataccagtctttctgtgcctacctattctaaagcctgatgtcatcttctgtgccttcccttataggcttacttccttcaacgctgaccattcctccagcatttcttattctaaagaggaacaggtaagaaacttcgttggagggaaaattaagcaaggattggcattagagagggagctgtgcacagtccctgtctcaacaaaaatagcttaagatgagacaagtactttacttagcataatcttgctactgaaggggctattctaaatgtccccccgcccaacaccattatgtaaacattctctaatattcgctacttaatttagattatccacccttccttctggccattgcattccttatctagcaatgcaggaaaagggcaagaaatcaaagggaaggaataaagggacttctgtttccagactgtattttaaagggaagtcatggttggttagcgattttctttagcttttgctttgcgtttgcagaatagctaatattattgttttacctatgggaactggtatccaatctagtgcccaatggggctgttgttactagagctattttctgtgaacctcatagcagactctcttctgctgaaaatgagatttactattcattctgggttctctcaaaagccagcctgccatctacaattagcggtcacatccatttggctatagttcaggtaagtccaattcttcatgtcctgcttctcagctctctgctgctcagagccaaaaaccttatcttagaaccccaaaatacatgtctagttgctgtatcaaagaccaggtagcagcctttacagaaagtcccttttctcagaatctagttgagccaatactatgcagtgtccactatattcttcttggttcattctctttcttttggaggcaacagcttactatggtgaggacaactggaatccatctctacctattcaccactttttaagtagtaaaattggtagctcaaaagtaactttattccctgctaagtcttgctctttccaattattattcaaacatgagaggtgacagtgagaagattggtttggcattataggatggtaccatgcaaggtactctaacaaccggccttctgtctcatggtctatctccctgcagattcaggttgcatcagctgtcctcctatgtccacaatccaaatgctatgggatactatggcagacaagttttccagttcttcaggaagtagcaactgtgagtattctagctcacaatgggaggagcacaacgactggactccagccatgagcaaatacaagtaaaggtttaactgagactgtctgctccccagttctccaacccctgcctaccccaagcccctttttgtcttgatttatagtagaaaagtaatagtcggtcgggcgcgggggctcacacctgtaatcccaccactttggaaggacgaggcaggtggatcacccgaggtcaggaattctagaccagcctggccaacatggtgaaaccccatctctactaaaaatacaagaaaaaaattagctgggtgtggtggcaggctcctgtattcccagctactcagggggccaaggcaggagaatcatttgaacccaggaggcagaggttgcagtgagctgagattgcgccatcacactccagcctgggcaacaagggcgagacgtcatttcaaaaaaaaagaaaaagaaaagtaatagtcacaaaatggatataaaaagagaggtaacaatgggaaactacaggggggcaaattaatacttttatagtttcagcagacctgtagtaacagaagaaaaactgattttcacttggttcagactatctccctgggctagaaagtatagggccaaggtagaggaatcggaggtagatgaattatcttcctgtgtcttcctttaagtagttcacattgctcccatttaggtaccagttaatagtcataattactataatccctctctttggatattctctaagactttatttcctcgtgagcataaagacataaaatagtacactggaggttagctatgattaggaagagccattctaactgtaaattactcataatccaagctctttcctgatgagcatgtatccgttataaaagaggctatgataatatacagtgagaaaagaatttgtttagaaattaagtgaatttggatctagggtcacctcagctattttgcgctgcgacattgatcaagttattttctctgggtttcagatgcctcatctttattttgtgcatttagatacacaattctaattggcccaatgggaattacacagctaacaccatcatgcagcaaaacaaaataaaatacagtggaactgaagtgagggagtaaaaccaccacactatgcagatgagactatctgcctagtaacaagacatttcttggactctggtacttcagccaaatgtcctctgggagtggagaggcggggagacaatatagtccactgccagaaagaacccacatctgttccaccactctcattgtcattgcgtttcctgggatactttcagaataattcattagtaacaacaacaacaacaacaaaaaaaaaaaacagcaaggaaaaggctacaaggggaagggtttttctaggtctttgggatatatctaatcatttcttcacggaatattataaagtagggtccactcaaagctcatccctcacaagccactcaacctttgacattcttcttctatttaatgtgagtcagaattcctaagattttttgaaatcctgcctgcaaagtctgcttatgaatttttttccttaccacggagttcccataaagtgacaggttctgcctaagtagttagctacctgcaaggctgctcgaatccaactttctttcccactctactttgcattctgctctccctttgctctcctctccttaggccctcaagtgatgccagcttttgttctagcactctagaaaggagttactattttgatccagagtacacagagaagagaaactggagtgggtaaaaggaagctcgtcactgagaatgctggtactgggagcaagactgtggcaaacccaggaaatactaacaataagaacccctcaaaagttcacctttaccaagccaatggaaacaatatagctgagtggggtttgaattttgagaactaatgactcctcagctaccatgtaattgccttggtgctccatttgctataattcatgggaaaggtactaaggtccttcaactggttttccttgctacctccacctttttcagaagttggacctatgattagcacacttcctgcctatccattcacagtgaatagaatggctggctaaattttaaaccccatttaaattattccacttcgaaatttgaatgatagatgcttgcctaagtctactggcctcagtaacattaccttttctcatgaccaagggtaaaagagtaaattgataggaggcacaagtttttgtggatgtgggttgggctggcaccaaatccaactacaagcatacagtgaccacttcatacacaccacataaaaaatacaaaaactgaaaaatactatcaaatgctttgacattttctaaatatttctgctgcccctataaaattgccttgtctgacctttcctcactaaccaggagatacggtgtttttcatttcctctcccttcaaattttacaagagaatcaaggaatttgaggaccaaagcaccacaaacacaagagtaagcacagcaaatatgacaaggggactgaagtaagcccctatgggaataggatctgctgaaggaatcaagagggatggacaaaggaacagaagacactcaagaataacttcaggaagtctccttaccgcctcacctgctttccctctgtcctacacatccagccttgcaaagaaataagagtaaagagaaaagtccatgtagcaccatcccagttcagaagcaacccccaagatatgggtcaactttatcacctcaaactctactcatttataatgacaaaattcaactgttaacacataggtaagagttcttcaggcatcggttttaaaggtccatgtactgggacgggtgcggcggctcacacctgtaatcctagcaccttgggaggccaaggctggtggatcacctgaggtcaggagttcaagactagcctggccaacatggtgaaacccagtctctactaaaatacaaaagttagccgggcatgatggcgggtgcctgtaatgccagctgttctggaggctgggacgggagaatcacttgaacctgggagacagtggctgcagtgagccgagatcacaccactgcactccagcctgggtggctgagcaagacactgtctaaaaaaaaaaaaaaaaaagttcatatactgaataaccatctgggcccataacagcttaagactttctggagaaaaaaaaaaaaaccagtttccagtttaatttccaacaaagcagtaggaactcttgcctatagaatactgtgctgggggctgggcacggcgacttatgcccgtaatcccagcactttgggaggccgaggcgggtggatcatttgaggtcaggagttaagagactagcctggccaaaatggtgaaaccctctctctactaaattaaatacaaaaattagcctgctgtcgtactacacgcctttaatcccagctattcgggaggctgaggcacaattgcttgaacctgggtggcagaggttgcagtgagccgatcacaccaccgcactccagcctggagacagagcgagactctgtctcaaaaaaaaaaaaaatactgtgctggttcatttgcctataaagtcaccaatctaatgtttgggtatttgatcattcagaattctagaaacactgaagatcccttcacctactcagggtctgggcctctttcatgaatgcttaattcccacagccttacagtttatacccttctcctctcccacttttgatcctcaagttttttgcttctcacattttttactgggtttgtgcttctcagtatccttgaccaaagcaactgatgctgtaagaaatgagacttcaaaccatttacccacactgggtgattaaggtagtttaaaaaaagaaatgaggccaggcacggtggctcccgcctgtaatcccagaactttgggaggccgaggcaggtgtttcactttaagtcaggagttcgtgaccagcctggccaacatggcaaaaccccgtctctactaaaaatacaaccattagccaggcatggtggctcatgactgtaatcccagctactggtgaggctgaggcaggagaatcgcttgaacccaggaggcagaggttacagtgagccaagatggcaccactgcactccagcctgggcaacaaagcgagactccatctccaaaaaataaattaatttattaatttaaaaagaaaaagaaaaaagaaatgaagaacttacggtaattagtgtggttagggacagtgagttagaaattgtcacatcaaaatacaaagttttcaaaacagtatattttattttacaatagcaaccaactccccagtttgtttcaattgtgacatctagatggcttaagattactttctggtggtcacccatgctgaacaatatttttcaatcttccaaacagcaaagactcaaaagagattctgcatttcacatcagttcacaagttcaagagtcttccatttatcttagcttttggaataaattatctttgaggtagaaggacaatgacgaagccacttaattccttgtgtctgcataaaagcagatttattcatcacaacttcatttatgtgaataaagcagatgatgataaaatgttctcttattcttgtttaatcagtagtggtagtgatgccagaaactgtgaaaggaaggcttttagttactttcttctttccattttccaataatccattccccatccccagctgaagaaaggggtgttactgagtccagctgataccacacattgaaaggtaaacattaatatttcaaatctgatgtctaactaaaaatgtacagaatgaaaactagaaaatttcaaccccagattatcttcaaccttgctccctccaccaatcatactttgacatttatctatttccttctccacttatggatgtaattggcttgctatagaaactacagttcagatgctttgaatgtatgaactacaatgaacaataaagtcctcttcttttgaagcatattttggcttcagctttaagataatcttatgacaagaagggtcacactgattcacttaataaattccattcttacctaacacaaggtttagttgataagcacttggacaaaaataatacttttcaaaaatgtaaagcaaactagtgaggacaaaggattttgtcctcatctcaacaatgatcagctattggaactgcatgaaactgaacaatttaaacctggagctggtaatgttcttaagaccaattcagaacaaaggcaggttgcccttaaaacaggtttgaccttttccttcactcttcctcctgtcccaccctctgtgagtgatttaaaaacggaaaaggtcaaagcccagccaggcctacatttagagaaattttaaaaaaatttttcctttcaattttggccaattatttccaatttttattttattcttaaaacttaagcatggtaaaatgttaagctgttttcatccactgatattattctactataaaaagcccttcttgagcagatttgatgataaaaaggagaacatttctaaggtataattagagaagctgttgcatgagaaatcatgtctccatctccattttgctatgcgttatctgaggattgtttctgaaagagatctatttaggcagtgtatgtatgtgtcagcatgtaaaaagtaaagaactgaaaatagacaaaccttgtaaatgcacttcaaaaccaattgtggctcaagtgtaggtggttccccaaggctggtaccaatgagactggggtttgggaattagttggtcatcatccctcctgctgcccagcagtggtcagtcatttttcatgagggatggactaggaaaatgaagtgtctattataaggagagttcctgtaacttaaggagcaagctcactacaaaacccagctacctgcttatcgtagtggccagagtggtagaagagatacggagtaggaattaaaccacacaatgttatttagggactaagccatgcccctaacaagaaaacaagccaaaaggaaagtattaggcattctctgggaaggcatgcatttttttcccatgtctctggggccaaaaaccttataccaagtacctattggcacccgaatatatttgtagaatgaatgaatacatgaaaaaaaataaacagtaacctttctcctatattctactttccaagccaattaataagcaagtgtcttttcgtcatgattttttttgttttctgtttaggatttaacaaaatggttgagataacagtcacttctgtttgatgaagagtatcacttcattccatttttgtgtttttgttgcatctccaagtcagaataaatgccttttggagcagatatatttcatttagcatttagtatcatcttcatcaatactcgtatgaacgaaaaaataaaaagccctctcttattcccactctacaacgcatgtcaaaggtgatctgtttagtttttccttagtatcgaacatatcacagctactcaatgaagtttcttctcaactaaagaaacacagtctcttagagaatttgttcctgtgtttccaccataagataaatgagataaagtgcactttggtttacgtctttcaagcacttaagaacagcactttattcagttttaataaatttttactaaattggtaaatgcaaaagaatcttttttttattgctcatatgtcttcctgtctctaagccagaccaatgagcaaatacctttaaaactagttgttacatcttgaaccatttaactgtaataaaagcagaatgtttagttaatgaattaaagaacaaaccctgagcccttttatcagtctcctggctttaaactaagccaatgaggaagtgatttgggggattcctgaaactaggaaaaatgtctctttattttgaaagaaacttgcatttttctttctttttttttttttttttaatctcaaaggcaattgagtgggtcttctgggccagacctatttaatttacgaaacatagtaccttgcagagaataggcattgaaatattatttaaacaatcaaaccaaagatgttcttctatcttcagctgtcagtgatctaatgccctcatctctcttatcctcaggacccagaatggtatattccacataaaagatgctttgtttatcaaatgaatcaaaaagcacgcctgaggcatttatttttactcctttacttctgtaggccaggtcaaggtgggtctaattcacttttatcatcagcacttaagaaactggatggaagaccacaacaccttgttttttgcaaaaattttccatctcctcaatcaggccaggaagcatgtatcttctggacaggactttatctctctactcagcttagtacactgccttatattagtccatttgtcccatgttttcatcactgaataaacttgttaaatgacttttggtctggatctcacacctatattacttcatttccttctgtgagcactctataatgataacatcatttttatatcctagggcatgtagttccgagccccacagaaagtaatcaccattcagtaagccaatagttcattcctatctgtatagaactgtaggctttgtaaatctacacatagatctctgttgtaggttcaataatgataataaatgtttgtgcccccagttgttatctctaaggataagagtaatcaatgatcattcagcagatatagcttatatatgggtggcagtttacaaattataaattgattttacacatattttcttctgctacccaagacacaataaagatggtttatctttgcatccccaatgcctagcaatgagattggcacacaatagataactactatagtggcattcttcagacaaccaatcccttgcgtatgcgtattcaaaagataatcattgttattcaaattttcctactttatttgcacaatataataactatcatacaattttataaacctagtacccagcaccaagtgagaaaatcaacagttacatttatatggtgccttagagttcacaaaatgctaacataggtattgccttatttttggctgtggctaaatgaaatatgataaattttcagtgcctttaacagtgagttcacatagtaggcaatcaaaattgatctatttaacaggtatttaaacccttggtttgtataactacttatagaacccttctcactgtggtttaactatacaatgagaattttgtagagacaatacctagcttacagaaagttttattcatacagaaagcatcaaatttttcatttacaagtgctttataatttagaaagcacattcgcaagctgaattaagtgactttcggtctggatctcacatctattacttcatttcctcatactagctctttcctggttacctggaaaaatgtatcagtaataatttaacttaacctcaccagtaaagtcttgattgtttaaaattaagcaatatatcattccttacatctgaatagtatagaggataaactttcctcttattacataggagaattaatcttgtattttacagtacccaaaatagctggtatgtaagaggcacttaatattcattcatccattcattcattcataaatatgtagcccattgacatttgtatcatgctttagtttacaaagcactttaatatgcacctttctgaaattttttgttctatgagaatacttttccccctttggtagctctagcacccagcatggtatctggcacattataggtgaccacaacaagcttagtcccttatgttttcagtatattttaaagtttaaaagcagtttccatgtgttttcgtttctgatacctggaatactgcatttttactcaaaattaccagagcagcaaacacaaattggcctcaaatatacatataatttattcatttatcaaacaattccttgtgtctgcatagtactatatccttttgaaagagcacttttttatgcttgctcctttctttgtatccacaacgcttatcacagtagaatacaagtgctttacagtttacaaagcacattcactattttttttcaggtcacctagatatcaataatcattgcatttttagtgcctagcacagggacaggcacagaaaaggaaactagtagtattcagaaattttctctgaataacaaataatacatcagggggtggtaagctatgaacagcaggccaaatccaattggctcaaaaactaagaatgattttgaccttataaaaacgttgtttaaaaaacaaatatgtaacagaaaccatatggcccacagtctaaagtatttatgatttgaccccttacagaaaaactgtggacccctgatttacataatgcttcacaatttacactgcactttcaaatgttaactgcatgattgccaatacactaattggtttttctcttatgttttacagtgctttcatacacattatcagtcatttaaatcaacttcccacataaacaggaagaaaaaaatcaaggaaagtattaaacatgctcaacagtcccaggttctctcatctttaagcctagagatgggtattaaacccaggagtagcgttggcacagtccaccaaattatttggccactactatgagcagggagttcaggctgtccccttgggacctcgctttgtcccaggcacagtcaccctttccataaccatcactagaaatcccaaaccccagaatcctgctcacctaagctcaaagaaggaagctgttgctggcaggtgcttctcagaagtctggcacatctgtgtatttcttgtctaattcttctcattggcctggagcatctcttcacatttttctctagagagcctggcacttttttttccccaacaacctgaccattttatcttctcagtctagggcttctggggtcaaaagaaaggactgaaatacagtatcacctatatgaatgtctgctcctgagggaagttaacaaaagccagattagatactgactggattttggtgtctctctcaagtggagaagatgtgaatagaaacagaagtttacaaaacactatagcctaacaaataggtaaaagctgtgatttaaagctggctcaagactggcccaggcataatactgtcaatctaaaggtaaccggcaacatcaaaaagtacatctcaaaagaatcaggcttaaagataaacaggagaactggaaatatctaagagtaagaagtgtaaacaatagaaaagaggtagggtttagggttctcatcttgggatttccccaggtcttcaagcttctatccttcctgggttctgggtcatgggcctccagattccggccgttagtcttgagatacctttttcgcttgggtcctctatccatctaggtaggctttgtgacaggggccttccatccttgggttgtaggtcttccagctacaaccctgggctaatcttaggtcgttggccttgtgtcacaagtctcagttcttaggccttccatgtgtcctgtcccaggtcttaagacttctaactcaagccttgagacttccatccaactcaggccttcggtccaattcaggccaccctctgttttcttggctcttgaggcttttgttggtttcaggcctgaggcttctatctatcttggaacatgggctttccatcttagtcctcgggtctcaagtctcaaaccatctgtcttatactttgggccttctatccatatgagccttccaccttctgccctacttgagttctgggttttactgcagtctagggccttgttttggtcttggatcatctcacatggcagcctggcataaggaaccgctccacaatgcttgctctgatagccgacgttctgcacctatcaggcaggggttaggaagcccctctgccacacatgacacacacacacgtacacttgcccacatatgcaaagaaatatttaaggagagattacatgaaatcaaagagagggagatagattcatgaagaggctgaaatactcaaaggtgagtagaaagggaagaagcagagaacaaatacaagccaacagagattaatactgaaatagaaaatcacaaacagcaagagatgctgaggcacgcaggggaggagagagagaatagcccaagagaggcagaaaggaaatgcagaaatgagaaatgtgagataaaaagtagaaacagcagaaaggaggccagactcagaaaaaaggtgaaatttaaaacgaacgagaaggggaaggggtaacaaataatcacagttcacaaagagaaaagagaggtaggcagagaaaggagaggtagacagaacaagaaaaggacaaaaagcacacagcatgtgacccaaaaaggagacatgaaataaagcgtgaaagaagagccacatctaggagagcaaagagaaatagcaacaaaatgaaaaatgagagatatgtctaagacaagacacagaccactcttgtgaacaaaaagagaaaatgaggcaaaggcacacacgaaagaaattagcaagagaaacatggaaatgggtaagacacactttagatagagaacaaagagcaaagacaagaaagaaagagacaaagaaatacacacttgagtgcaagagataagcaaaggcagacattcagaggaagtaagtagtagaagaggcaagatacagtgaggggcacaagaggcatgaaaagcatcacagaaagataaaaaaaatcaaaaagtgtcattagtaattataataaactattgttactacgaatactacttatagtactacaataataacaaccaccaataccaacacagatgctcttctatttataaacttttaccttagggatttcttacatagaaccaaagcatgccaactctgcctgctacctgatagtgctagtggtcacttatattgtgggaaatgaacttatgagtcttcttgggttaccttttacttgacatgtgccaggcactgcaataggtgagcactttacatacatgatttcatttaaccctcacaaacagagaagtctagagactttaagttgtcaaaggtcatatacctaatgagtagcagaggatttaaaacacacaatgtatgcctcttaacatcctgttacaactatttactaggatttctggaagagccaaatgggatgtcacagatgactaagtattttcataaaaggctctttgataggacttgctcaatcccctcctttagcatcacctttccccaactctttagaaaactgacttcattctcacacttttataatggctacttcagagtttagttttctttttacactaatcttaactgacgacagagtctctcacaaacggagatgagaaagggttaccctttcagcagaaagcagaaatggtgttttaagcttctcaacgtttaaggctctaagaatgacagagggcctatacagtgaagacatagaacacacaagcaaaggctaaattcttctgtgatacaactggtaagaagaccataatgtctttgagttgcttcagtgaacccagtcagtaatatggaagactggtcatctttccatctcacatttagccccacttcacattagaccaacacaccccatccaacaccagctcccaaaaaacagctgttataacagttctgaagtgatcctcacaggactgcaacatcaacaacttacttcattcagctatcctcaagtgctagagtgccaggcatgttgatcttcaggtgggaaggctgacttccttcagtgtgttcaaatttcttggacctgctgaagactcagctctctgcactgcttgtaggaagtataatgatttggcagataggaacaatgaagagctataaaaaaacatgagataaaccatgtaaatgccataaatattgagtactgtgctagagttacataagattcaaattaataagcaatagaaaatgtttccacagaactttgaaacctataaagtcaaaacttttaggtctttagagagaaaatttcctcattcaacagaataggaaactggcataaatgggaaaatgtcttgccaaatatcacttgatgagtcactagagacaccactaccagtcatagccttataccttagttaaagaccagaactgccgggcgcggtggctcacgcccataatcccagcactttgggaggttgaggtgggcggatcacctgaggtcaggagtttgagaccagcctgaccaacatggagaaacaccgtctctattaaaaatacaaaattagccgggcgtggtggtgcatgactgtaatcccagctacttgggaggctgaggcaggagaatcgcttgaacccgggaggcagaggttgcagtgagctgagattgcaccattgcactccagcctgggcaacaagagcaaaactccatctcaaaaaaaaaaaaaaaaaaaaagacttccatcctgttttaagtgccaatcagctaggaaagagtccctttaaatgattaataactgagatcacaaaaataatagatatgagagggaaaaacataaggtcttcccaatgtttaaggctcacttcgatgttttaagacccctcaagtttgctttaagtctcctggctcaggactaacaaaacacagccttagagcagcattttcaaaactcacaatattgctctttgagataaaggtgagtcactctggaaggcaaatattctcacaataagaaaattcacataggttgtttaacattgcagctaaaatacaaaaaaaaagaagaagaagaagaagaaaaagaaaattcacatagactactggccctaggagaatttatctaaagattatgagtacaatagatagatcttcctagataactctcaacttagctttctagttcctagactttctaacaatttgttagtaactctctatttctaaatctacagagatttctagtcaattataacatttcaagagttcttacccatgaaaatatttcatgaaatttatagctacccactatttacgaagaatgctgggcaaagcctatacgttcaggatttattgcaccgaatggtcacctttatctgccaattctcactcgctaatcagcctctcccaacactgacctagagaatgtagggtcctggttctttagctcctgcctgatgacagataactttgtgccatttttagtcaggtttccatttgtatttatgcggcttccatcaatcagcaaccatagcataaaaagacacacctctcacttgttgtattatacaccatggcatcccaagccatcctgaagtatgtaaatgattggcaaagttcttctgtaaggctttaagagagactttggggaccacatggaacagaatgatttgcccatgtgatcaatgtcactgatgtgacagttgtccatgttctcctaaaagaacaacttagctgtaagcctctgccacgtgctatagtcccactccaaacacccgaacacatgcaacccgctaccctctttacatcatcactttaaccagttaatctcacacccagttgcttcccaggttagttaggaagctgtttttaccaaatcatatgcagaataatgatgaatacgacctcagtgaaacactaagtgcaatgtatactggaaaacaaaatcaaaattaagactacttattatgcttttagggacagcttacgcaccttgacgtgtggtggttgtttttgagactttatcttcctatctgggaccaggaaagtatcttgacagaacctcctgacctagggttgttgcccagtggtagtgagcttttcccctggaggatcctcatgccccatctccacctagggatcgtcaaagggaatggatcactaacactgtaaaacaacaagcctattcttctgaggaagatctgaaaagagataaaagaaaaagtattgaaatgcagtacactgggaaagtctgttctaatgggcaactagtggttgagttcaaccatatttttacccttttcttcatgtggattgaagagtggacatttacagttgtgcggagctgttatattctggctaccaacttagcaaaaaaaaaaaaaattatcctattcattccagctctattctgtatgctttccctcatttccaagagaaatttagaactgagtaattgccaatattcccatgctgcattttattctccagtctttattactgagcgatcctctacaatgtgggttgttaatacccttgtgttctcagcacaaaatatagtaggggggtcaagaaatcaagaggttgaaactaatggaaggagaaactaatgctttctcaaccaagagagccatgaagccacacagaaaaggtcggatgtggtctaaccctatgagttatgtaagaattctcctccacaatgcctctggcttcctttataaagagctattttaagaactgagaaatccacctctatcaaagtgcctgtcagctagttctgtagcatccccctcttttaatttgtactttaagtagtgccatgccataatattgccaagataaagagaattgtttcctactcaatccacatggtaacatttcttcaacaacctgtataatagggcgccaccaaagttctaggatattcggagaaaccaagaatggtcacaagcacatagaactccagttataacaacagctggccaggcgtggtggctcacgcctgtaatcccagcagtttgggaggtcgaggcgggtgaatcacctgaggtcaggagtttgagaccagcctgaccaacatggagaaaccccgtctctactaaaaatacaaaattagcctggcgtggtcgcgcatgcctgtaatctcagctactcgagaggctgaggcaggagaataacttgaacccaggagacagaggttgcagtgagctgagattgcgccattgcactccagcctgggcaacaagagcgaaactgcgaaaaaaaaaaaatacacgccacaaaaacagttaagcaaatctatgcagaaggaaaaacaaggtacagaaaaccagggattcagtaaattccttatacaggcccccggggctctcctattccactttttaacaatttcaattgtttttcaagctaagaaattttgatttcttaaaacaaggaaatggcagtgataatggaattaggcctaccaaaactgagctaatacagatgaagttagtcttatttgtaaacaaatcctgagaacttaatacccatctgccaaaggaaagtgggaataatttaaaaggccactaatcaaaaggtgttaagttcattaaatctatcttgctgtgtggtgagaaaagaaataatttagtgctttgcatctctcattcttcattggggatcaagtatgcttgcccttacagacctcactggagcccagctctgagggataaatgaaacaggccgaactcattatgtaaagttaaaatgtatgtgtacatgcaaaagaaaaagtataggaattgatgaaaactggctcacgttctgcttttctttctttttaagagactgggtcccgctctgccacctaggctggagtgcagtggctaatgatggctcactgcagccttgaactcctgggctcaagcaatcctgctgcctcagcctccagagtaggtaggactacaggcacgtaccaccatgcccaactaattttattttattgtagagacatgggtcttcaactcctggcctcaagtgatccccccacctcaacctcccaaagccctggaattacaagcaggagccaccatgcccagctgtgttctgctttaaaaaggagagttgtgggaagttcaatccaaagacagaagcactacaacaataaattccccaaactacctttttctccagatagctggcaacccatccaagtagattagctggagcttggccagattctcaaagggaaagatatgattaatttggagcctcttatagctgtttgcagtcctcaggtctcacatgctcagaatgtccttaagaagaaagacagggttcagtaggctaccaaagcaccggtaggataccaaaagagttacaaaaaccccaatgaaaaaaacctaggaagtataaactgaagcattagacataggtatctcctgtctctactttctagcctgcttggtctccctaaagtcctctaatgacaagccctggcagtacacgggaagattagacaagtgaagaaaaagaactacatgaaaatatgggtcaaaccaataccgaccttaagggctgacactaaatttgtggctaatggtcatcctgttgctgaaaatacttcaagattcaaggtggtgtggcaactgctactactgcttagaggtgcaattgtcttgactgtttttaataattggctatctacctttactatagcataggagctcactaaaggggatctaagccaaatttgcagtcttgaaagcactttgcatggtactgtatagtatggtgtgaaaagcacccagtatgttaaacctgagtaccttaaatgaatacaggcttccagatccctgatcagggattactgtatcatgaggaaacctttatgtcaatgtcaaacaggaatatatggaacatcacttattcaacactattctctagctttaaaaaggccaaactgttctatgatgttctcaatataagcagaacaagcttcaaaatctcttgccaacatccttccccatcctaatttaatctaagattagatacttgacttccaaatgcaggcttccagttaaacatggcggttcatacatgtttatgcatttactctactgcttcctaaaactccattaatgagagtaaatgtgcactccatatgcaagcaaatacacctaaagaaattttaaataaacggatcctagctcaaattcatttatacactggcatctaaaagggaacaactattccagtctccccaagtcttcttaagcatatttatggagtatcttgctttagcatcaaagccctctagttttgcctgttactatggtgatgacatactcaaagagcattccctttcccttaacgggaatctaaggctagagaaaatggttacattttggaactgggaatctaaggctagagaaagtggttacattttggaactgatacagaaccatacatttcactagggttcaatattcactgacaagaattttgagaatccgtcatcttgcagaccaacaaaatatcaaagtcttatggagagaataactgagtggcacagccagccatctggttcaaatactccagcatcagacagaattgtcacagctagacgtgatattaataatcacataggccaggcgcagtggctcatgcctgtaatcctagcactttgggaggccaaggcgagtggatcacctgaggtcagaagttcgagaccagcctggccaacacggcaaaactccatctgtactaaaaatacaaacattagctgggggcggggggtggggggcgggtgcctgtaatcccagctacttgggaggctgaggcaggagaattgcttgatcatgggggaaggaggttgcagtgagtcgagatcgtgctacttcactccagcctgggcgaaagagcaaaactccgtctcaaaaaaaaaaaaaaatcacataattcaacattttcattctctaaggaaactgggaacccagaagatgaaactacctcaatgttacacaaatagaaggtaaccaagtgatacttaaacccatgtcttcccacaattcaaaggtcttttaactgtggggtctgtgcatagattctcaggacatatggggagctttctacaaaactttcacaatactctcatttcactgtaaggatagtttagatcagctatatgactacttcataatataggaccacgttgccagattagtggcaaatgttctagttttgttgcctggggattacagaaaagaagagaagcaaacaatatataaatgtgttttgtgccaaatgaaagtgaaatagcattgctatgtgctataatggcaggatttaaagcagtttgaaaacagcagtttggtgaagtgcatcaacacagcatgtgatattacagacacgccactcaaaagaaactataatactataatagtagtgccatatttgcattttagttatctattaactactaatttgtacatctgctatgttttatagttgtattatagatgtaggcaaacagatttcattccaggtttgttcatacactttaacttaacaattattcccataaacctaaatagtacataataatatttttcttttacagaaaacgtttaatcaaatatagcaaaatattaattgtagaatctaagcagtgattatgtaggtgcacactgaataattcttttcttgagagaaaacctccctactatcaaacttattatacagacttgagaaacactgtctcaaactaatatctaatataaaatattaaaattatactcaacataatttcatgttattttaaattgctgattaatatgcaatgcacatgacaatgctgttaatcagggcactttttgtaacagcacaccaactttcttgactaaaattgaaaggttaaaaattatatttgggttacaattgccaaggaagacatctactccttgggtcttaaataggcactttggaaggctagctggaggtcagtaaatgaacctttcctatcccacgtgtgaacatgcctttcccttcctttcccacctccagtgttctcagggtcctttagctcttagaaaaaaacggaaagaagaaatgcatacccaaggaacagcttacctggcgatatcagaataatttaatctgaaaatcaatgtcaaaatgtggattgaagtaaattctggttcttaagataaagtttgtttctgcaacctattttacgtttcaaaactggcagaaacatttagggcagaagggtcatttctagtttcaagaataccctacagctaaactctccctaaacttaaccatagaagcaaatgtcaaacactcactaccgtaatattaacagaaaaatttcccaaccaagccaggtttctcactgtagaaatgggaggtaacagataagcaaggaggtgagactataatgatccatgtggcaatgattagagttggagacgtaggtataaacacatttagtttaatatagatacagatggttatatatatttatagctatgtgcatatacacacgttagaatgcaaatatatatctccttgctcttgtcaactgaaaaggtcttgaaggaatgacactccagtagtaatgagcgcacctagcattcacttcttgatttctaatattactctccaataaaaagtatcaaggctccttgcagaaatacatcattttaggtccaggcaggagatatgcaaatgagtctgaagcatgttgtagttccaaaaataagaaagtgctcaaacaaaaaacccacattcatggggttatatcaaagccaaatgaaagacctcccaatggccaaagctggaacaatttgaacaacagaataaagtaatactgtattataacccagagtataaaatatccctgagatcatactgatataaatgactgaataaacacaatacattgtggagaaaagacatcctgtgcaaaagaattccaaataatttatgtaaatactctgccctcaatgaggtggaaggtaatttcccattccttaagtgctggctgcacatagtgacttcctatgtgaacagtatagtagggaaatggagaaataaagactaattttacgctggagaaacctgacaaatagtacctcagacaggtgattaaggataacataaacagtgataagtcatgttgatagtatgtactcttgataagtgataagaatggcactctacctttgtggtcttcctcctaaacactcataaacccaatctagtcatgagaagaacatcagacaaattccaatagagagacattctatagaatactggaccattagtcctcaaaactgtgaagttcatcaaaaacaaagagtctgagaaactgtcattaccaagaggagcctaaggagacatgactactaaggacacatgcagcgtggtatcttcaatgggatcctggaacacaaaaagaacattaaggaaaaactaaggaaatctgaataaaatatggactctagttaataataatgtatcaatattggtttgttgtgacaaatgtaccaaactaatgtaaaatgttaacactgggaaaaactgggtgtgaagtacacagaaactctatcttcagaatcattctgtaaatctctacactgttctaacattaaaaggttattttttctaaaaatctcccaaccagttgctgaagacttataagacacagtttttaaaaagcaagcaaaatggaacctaagaactggtaagtctatgttccagatttttctacagtacgtaccatcattgtttgcagatctgatctaaagacttactctctttcttttctgtttatatggatttataataggtaattttgatgttaaaatatacaaggcccaaataaccaggtatccgtaatatcaaaaagttattttttaaaaaaacattagcaattaaactttgtttttgtacatcaacagatttcctggaaagacctagtcaatctgctgtaaaaaataagtcgtaagttagtagctaattttcagtcaagggagatctataaggctggaaaactttaataacatatagattgtagagtgattatatcccatcactgttcaatgccaatcacactaacagcatactataaaatatactatgccactagttttcaaagctatgggtaaagtaacatagataattttataatgggacctggtaaagtacagtgatgttccagtcatatccctatttttaaattcttatacgcacttgattatgtaataagagggtattgcttgggtctactgcataacctctcatgtttccgggaacactagaagactagcattctaattggttaaggaaaataatactttaagtctacccataatttaagaagtctagcaccggtcaaatttacattttgtttcagtttctcatcctaacatgaaaaaaaataatcaaaagttatttctaatataaacatcaaaacagtaaaggagaggcttctttaccaaactcatttgtataagatgcagaagaagcccaagctccatgtatcagtactcaatttggaaaggtcaaggaagagctatcaagtaaagcctaagtcaccaacaaaaacatgaccaactcgacagcctaatacacatatatatagtgatatataactgtacatggccactgaagtttaacttgttaaattcagcaggccagctatgtcttaaatacatgagctccaacttgagttggatttttgaaggaaacctgtgtaaaatgctacttgcctacagcccaaaatatggtagtgagaatatcaattttctcccaatccagtctttaagacaaggcagaggaaggcattagctctgtttaactgacacatcattactctttgccatccaaactgataaggtttgggggaagagaagaggcattagctcagttcagatataatcattagtttctttctctttaagctggtaacgtatttttccaggatgctttcacatataagaatattttagcagtcaacaaaggtcaactcttaattcattactttaagacatgaactcccttcaagctgtacatttgataatcagggcacaaacaccctgaaaagaaattatgaatgcctaatcacagcagccctgggtctcacagtcttctgtaatttagggaggtggctagagaaatggaagttacagaaagataaagctgaaagaggatatgagaaaatggtcagaaaacttcctccaatcctacatgttaaggttttataaagggaaaagtcagaaaagaaatgacaataatcatttaaagaaatgccaaaaaagtttccttcattagacttttgaaaattttccaaatcacaaaatgtcattttcagggatttaggtatttgatataagcccctatcttatttcactagcagtctcgagatggtcagattgatggtgatctgaaccaaactcagagccaggactaaagtctaagcatttctgcccaaaaccataatgatttccttctgcatcctccataagaaagcaaattccttgatataaatcctgtctttggttttgctatttattccagcacctggtacaataatatttgttgaactaacacaagaattatctctattttgaagatgcccacatttccagagcatccctttttacaattgctagagatttttcttaagggtggaaattatttcaagcaatgaatttaaatacagcttcaagattcacctttggatgctatctagtataatcaatccacctaaaatcaagccatccttcctcttgacttaaggtacagaatcacctccaaattcattcatttaaaacaaattccaataataattataattgtatgttgacaatgaatgacaatttaattaccaatagaagatttcataagcatagaccagggtttctcaaattggggtgataaccctggggatttgtgaatatattctaatggatccccaagttctacataagttatataaaacacatctttgacaaagacaacgtgaaattggaaaacatatttacatttcaaatatctttgttaagtcagtgttcctcaaaacacatttttttaggatctcagaaaattttgttcctttagaaggtgtttcatcatgaagcattacttgggtttgagaaacaatggcacagaccatgtttccaagaaggttcaagaccatgatgtatataaccctcagtcagccagacaatgttgttaagcatatggagtggggctgggaggcatggaaacaagccctgaggaaatatggatatgaattaaaacgggctataagtgaagccagttcacttatatggttcttgttgctcctgctgtgatgcatgaatgtgcaccagaaaaaaagtttcgaatgttatgttaaacaatattttgtcagctggaaaacattaaggaggctaagcttcttttagctttacgaaaggtgggaggaaagaaggtatataaactacagcataaagtaggcaaggaaggtcaaggttttgacttcacttctccactaccctcttggcaaaaaggttccaaacttaaaaagtatctacgatatgcattatccatggtcatctgttcttgggcagaaatgtagtaaaattgtggaaggagccgaagtattagatttatgccctcaatctctgaactttaaaatactcaagcttatgagatttagcaatcactaatttgccaaccttcgcaaatagccaaacacaatggctatgctctatccctttcatctctttccatggctccaaaagaggtaaaaaacaaatgaaattaaaataaaccaactggactatccagatggctgcaatattaatcctatcttggcttaaagagaaaaagcaaacccacttccttaagtttattctatcaacttcaaatccttgtgggttcccttcctaaaactactacttatgattcacacaaaacagcacttattattttctaaagttatttcaaatgtgctcacattagctcctcaacgataaaatcatctcaggaatgaaattatataggatgatatcattcctacccaggttatcagtgtaacctagcatagagctgggtccacaatattaattctacagttctgctggttaactcacatatgtgtatttatgcatgtatgtatgtatctatttctctctctatatatatatattgcagatgaggtgggaagaaggaaagaaacttactggaccctctgacttttctataggtggcatctaagagaaagaaaatagaataggaaaaagattacttaatagctacgaagtagtacttacagtattctaaagagccagagactcttctttacagctgtccgaggagctagtagggcaaactgctccctgagctgggccgatcttttgacatccttctccgagaaacaatattctttttcagttattacaaagaactgctgttgtgatgactagttatttgcttgagcagttccatattacataatcctgtgccacaaaacaccctgtacactagtggctgggatattattcatttccactaggcagctatctcactgttgaaatttatatccaaaagaatatttaattttggcttatttttcttataaaatagggaactcgtcttatcatttttaagtcctcacctcagtgtggtacttcaaactacttcaaattattactataattaaatgcttcattttatataataattaataaaaaaggtggcatatgctttttaaaagcacctctgcatatgttccctcatttaatcgttttactgcaatcttcttgaaataagtaggggcaggtgctccagatgaagaaattaaaggattataaaatttaggtagtttttctaaaagtgaatgctggtaaagcccacacaaagatactggtcttaagagttccactctagaatatctttgatattaaaatagcaagagtcagtgttctatccacagacccaccaccctcagttaaaatgagagacactggtcaccaggtacatagtataaatggatattttggcttcaaaaaaataatgaccaggttatcgagtccaccctacaatccagatgtctttcttaaaaaaatttttttaataataataagcaatttttctggctgtatcctggcatttggcactttacaataacaatatacaaaggggacaacaagagattcttaaccaggcaatctgctctggaaagaagaatgcagagaaagtgccaaccttccttcctggggagacaattttatagtgtacactggaaacacaaaataaaggatggcaatccagctccctgggtctgacttgccttcagtattttgcacagtaaagcagtaacacaggtgggcaagaatggttcttgtccccagaatctgacaataattgaaactaggatcattaataaatgaaagaaaatgagtgaaggcttatccacctagttcaggcctgcttttcatagtcaacactgcaccaacacaccaaagtggtagggagatcttggactgatgggctgaaaaatgggacaatcagtactgtgtttattaataacacagaaggggctttgggtagtcagcatactcagaagcaatgcgaaaggaagtagaggggttcatgtataatgggtgggaccaaggaaagtgcaactgagaattgtttaagtccaagagaaagggccttgtctggtcaacattacccagcaaagaggcaaaaggggcagggcagagggaagggaagagggagacagcacaatcttacctaatagctgcaaatatggacacctgagattgtgagcaatagtctgtaaaaaggggccaagggcacacaaggggcagagagagggaagacttcgtatataaagcatgacaccatggctacctgtgattttacacactggcgcaatgcaaaagggttgggagtatggaccactgtttgatagacaagtgcatggaatactccaatgcttatactttattatgccatgggaaactaagggtggggtggggcgcttgcttaacaaggtcagggagggagaaaaccattgataactgccattgtgcctattaacagtcccaggagaagttttgagtagtcagcagcccctgcagtaatgcaaaggggatactagggcataatatcccactctaccagaaggagacatatataattgcaaatattcacattaacagtacaaggggccttagtgggtcagtacccccgatgtaagcaacgaggaagcaggagtcttatctaatgatcagtgcccttgataattgttattaatgctattaattgtccaagagctgagattatgagtagttaacacttctcagcagcaatccaaagggtaatgggaggaacatagggtctttttctcctacacaggtccacaaatacaattatgacattaatattaaaagaaaagggttcattcataattaacatgcccctgatgcaaggggaatatgtggagatcaactcttagtctaaaagaagaggtggacaattgcattaatgcatattaagtccaaaagaaggggcacttagtgaatatcatccccctgctctaaagcaaaggtggtacaggaacatgcttagagaattgagtttgtgcacatgaacattccaagtgacagtcttgagtagtgggcactacctgctaaaaacactaagaaagtaggtaggatccttatctagtgcacagatcaggagcaaatgtaattgcacatattaacagtccaaaacaacaggactttggttgatcaggacaccctgttgtactacaaaggaaaggtgatggggtatgaccttaatctactgacaaagacaaaagaaaatttcaattatatgttgatagtccaccagaaggggccttggagggaaacagtataccccacagtaatgcaaaagaggtataatggtcctagaagtgatagggttgtggacaactgcaattattcacattaactgttcaaatgtaaagatcataaggagtgggcacccactattgaaaagaggtggggcatccttgtctagggcacaagaaccaacataaatgcaattatgcatgtcaacaagccaagaaaaggggacttagggggtcagcaaccctggtatactgcaaatggagggtgagaaggtagaactttgtttaattaggatgaaccatgtggtgattacatacattaatgtccaagggacattgttgtggtcaattaaaaccatgtactttggacaaatataagaatcttaaaaagtagtgggtactccttgttgaaaagcaaagggagtccatgagaaggtgcccttatctagtacacaagaatatagacaagccaagcaaagaggcctcagtgatcagcaccccagctatactgcaaagggggtctgagagtaggactttattcaaataggataagccatgtgcagttatgcacataaatttccaagatgcatggttgtggtcacttacaattgtgcaccttgattgtccaaatgtaagggtcttatggagtgagcactccctgctgggaggaaaagaaagattatgcgtagatgggatggggcagaggaggcttccttgtctagtacacagaaacctggacaaatataatcacacacataacaggccaggaaaatgggccttggttatcagcacccctgctgtactgcaaaaggggtctgagagtaaggccttattcagatgagataggccgtgtgcagttacacacattattgaccaaggtgcatggctgcggtcacttagaattgtgcaccttgactgtccaaatgtaaggttcttatggagctggcactccctgccagaagggaaaggaagattgagggtggggtggggcaggggaggcttccatgtcttatacactggaacccagacaaatataatcacatacgttaacaggccaggaagaggggccttggttatcagcacacctactgtactgcaaaaggggtctgagagtaggaccttattcagatgggatgggccatgtgcagttacacacatttatgtccaaggtgcatggttgtggtcacatacaattgtgcaccttgactgtccaaatgtaagggtcttatggagcgggtacttcctgccagaagggaaaggaagattgggggtggagtgtggcaggggaggcttccatgtctattacacaggaactggaacaaatataatcacacacataacaggccaggaaaaggggccttggtgatcagcacccctgctgtactgcaaaaagggtctgagagtaggaccttattcagatgggatgggccatgtgcagttatgcacattcatgtccaaggtgagtgcctatgctcacttacaattgtgcaccttgattgtccaaatgtaagggtatatggagtggacactccctggtggaagggaaaggaagattggaggtggggtgtggcaggggaggctttcatgtctattacacagaaactgggataaatataatcacacacataacaggccaagaaaaagggccttggtgattcagtacccctgctgtactgcaaagggcatctgagagtaggaccttattcagatgggatgggccatgtgcagttacgcacattaatgtccaataatgtccaaggtgcatggctgtggtcacttataattgtgcaccttgattgtccaaatgtaatgatcttatggagggggcactccctgctggaagggaaaggaagactgggagtgggggtgggggcggggggaaggcttccttgtctaatacacaggaacccagacaaatataatcacgcacataacaggccaagaaaaggggccttggtgatcagcacccctgctgtactgcaaaaggggtctgagagtaggaccttattcagatggaatgggcaaagtggttatgcacattaatgtccaaggtgtatgcctgtggtcacttacaactgtgcaccttgattgtccaaacgtaagcgtcttatggagagggcactccctgccggaagggaaaggaagattgggggtggagtgtggcaggggaggcttccatgtctaatacacaggaaccgggacaaacataatcacacgcataccaggccaggaaaaagggccttggtgatcagcacccctgctgtactgcaaaaggggtctgagagtaggattttattcagataggttgagctgtgtgtagttatgcaaatccatgtctaaggtgcatggttgtgttcacttaacaattacgcaccttgactgtccaaatgtgagagtcttatggagtgggcactccctgctggaagggaaaggtgagactgaggtatgtggagaggaccctccttttctagtgcataggatcccagacgattataatcacacacaacatgccaagaaaaggggactgcgttatcagcaacccttctgtattgcaaaaggggtcggagagtaggaccttattcacatggaatgagcagtgtgcgattacgcacataaatgtccaagatgcatgcttgtggtcacttacaattgtgcacctagactctccaaataaaagggtcttatggggtgggcacttcctgctggaagggaaaagtggggatgaggggagcactttccttctctagtgcatagcaacctcgacaaatacaatcacacatattgggaggccaagaaatggggccttaggtgtcaccaaccatgctgtccttcaaaaggaaggatactgatgtaattgtcattaggcacattaacagtttgagaaaggggccttaagtgaatagtaccccatgcaataaagcaaagagggtgtgataggtcagaaacccaagtctaattgaaggaccattgacaactgcaattacatgccatctacagttcgaagagaagggcttaatattgattagcactctctgctttgataagtacaggagtcctgataaaaggcacaactgtatgcaactgaaaatgtgtatataacacctaagattatgcacgctaactttactagtctaagggtcttaagtagtaggtacttccagctgggatgtaaatacagtgggtggggtccttacatggtaaaaaagtacagcagcaaatataagtatgcacattaacagtccaagagagtgaattcaggctagttagaagctcctgcagtaatgcaaatggagcaaggaagcgggattctactctaacataggggcacatcaactactgctaattatgcgcatttaagcagtataagagaagaagcactagctagttagcactcctgctgctttgccaaggaggtgtgagggggatgggattccagggcaattgtcttacttttttttttttttaatgttggccaggctggtctcaaactcctggcagtaagggatcttcccacctcagcctcccaaagtgctgggattacaggtgtgagccaccacacccggcctcagggcaattttgcataatagaaattcaagaaagactttaggaaatcagtacccccttctatgatgctgagaagtcaagatattagcttgatataaaagctagatattagcttgatataaaagactcagttctaatcaattagacatttgaaatgtcttagacaattgaaatcaattaggcaattgaaaatatgcacattaagagtcatggataattagaaatacacattaagagtcccaagagaaggactctgggtttccagcatccctttctataatgtaaaaggggtagaatataggtttaaagggagagaccatgaacattggaattttgcacattcatagtcccagggaaaggtaacataggtaattaatatcccttgctgtaaaacaaggaggataaaatggatctgatctgaaagacattgttgtgatcagttgccatggttcacattaactatcctagtgcaaaggtcttgactagaggtcatccactgctgaacactagggaagtgagtggggtctttagtgcacaggaagagggacaaatgcaagtagcacattaacagtacaaaagaaatgtccttgtgattagcaccctctactgtaatgctaagagggtgtgagcagttgggatcttaatttaatggaaaagaccataattgcaattatgcgcattaacagtcccaagtaccccctgctgtaagacaaaaggaatatgaggggatgagaccccagactaacagcagatagggaaattgcattttgcacatcaataatttctggaggaggggcattaggtaaccagcaccctcttgatgtaaagcaaagatgatgcagggaccttgatataaaagactcagttctaatcaattaggattgtgcacataaactgtcctagtacagaggtcttgagtagtaagggtcccctgctggaatacaaagggagtggaagggttagtgcacaagatcgtggacaaatacaattatgaacatcaatgcacaagaagagtccttgggtgatcagcccacattgtagcgtgcaaataggatacagagtccctttctaatggacaggactctggacaattgcaactgtgcaaattaactgttcaagagctgttattgaataatctgcactcgttagcaacatcccacagaaggtgggatggggtgagaatccatttttattgcacagaaccatgaatatatgcaattatgcatatcaactgtttaagagaaggaaacttgggtagtcagaactcagcagcaatggcaaagaggacatcctagactaatgagtgggactatgggcaattagtgttttacatattaatgcaaggtggtaggtagttcacactatctaggagcaatgataaaggcatacacataagtgggtcttctctgttacgcagaaccatgaataattactattgtatccattaatattccaagggaaggggctctaagaatgagtcagtcccactgctgttatgcaaagatgtttgcaaaggccatagtgtaactaacagaactatggataattgggattttactcaataatttaagaaactcttaaatctcaggtagtcagcgctgcctcaaggcaaatgcaagggcgactggtagtcttcatgattaatgggtgagacaattagcaattactactttgttctttaattgtccaagaacagcaggattctccagaagcacagcaaaaagcgcagtagggtgcctttgtttaataggcaaagctatgacaattgggactgagcattttaactgtccaacaaaagacgggttgtctgcgaccccctgctgaatgcaaatggggttcagagtgctgtctaatccaatgggtaggattattggcaattagaattttactcaatgcaaagagttttaggtggccaacacagtacacaagaaaagatcactactcaaaattgggactgtgactacagaagcaatgacagagaaatggtttctcctttaagggcaggggatcgagaaaatgataagtaactcaaattgtgggcaataatgctctgatagaaagctctcaattgacattccctaacttcaacgtaccgagtaaggaaattctttgtcctgagatcacagacaaatgggattgtatgcattaactgaaaatggtcaaggagtcagtactgaagatcagcaatgccaagggtaaacggaatatcccagtataataggataagcaatggacaacttattttgagcactgaatcaatgaaaattagagtgactttcgagagaagctgggcgggactgaggaactaggactgggactggggctagggctggggggttaggggactggggctggggcagggctggggcggggtgggagtagggctggggctagactaggggtttgctgggagcagggctggggaggaactggatgctaggcaggcaggatacaacgaaaaattgaaatactccaatataataagtctgaatagaggacaccagaccacagcaattcaagtttcctgtctgataagtaggtgattagtcaattagtgcagcatcaaggatgggaacaaagcaaggcctggacctgtgtaaaccttcaaacactcttttttacattaggtcatgaagttaaattttttactgtttctgtgctacagactcttcaaaggaaaatagttaagtcaatttcaaagaaaatgaccagcacatttttaaaacattagaaatgatttgactttgactatctactgccaaaaaaaggttaaggaatttgtaatgagaagctaaaaactttaaggaattttaaggaactcaaaacaaaaactcattaaatgtaattaaagtgaattctacaaataaagcctcttaatacatttctataatagtcacttaagacttaaattcaaacactagcaaaccacaaaatcagactgtatgactgacatccaaaagataaatataaatcaaaatccgaccccagcattagccaaggggtaggtgttcctcttgaggaaggcaggaattcctcttctgccacctgttggccaacgatcatctgtgatccattctggtccttgccacggctcaccaccatgtccacaccaagcaggcctggagcactgcccatggcaacagtgcagtgcagggcagaccagaggggggtaggggggtaggggggtaggggggtggggaggtggggggtggggggtgggggtggggagttgggggggttggggggtggggggggaggtatacttagccttaggtgaggcaccaatacagaggaatggagggaggttcagaccacacagccagatatccagcactgcaagaggcagcactggacaggaggggacaaataagaggggacagaggtggaaaggctaaatgtccttgaaaagaccttgaaaacacctggtgtaccgcccactgggagacatacacgtggcccctccacttctttctcctgactggctaaagacagctgcgaagtgccatgctaattcacccaggtcttcgctgagtagctggacagtgtgtcatcagtctaattccatcttctgctctaattggctgtgatcaattccacccccatttctaattggttgggttatgcagcaatccagcactgtccatcccaccttttctcccgctctgcgtggcactaggcggcaaaacccgccatctttaacaatgcggcaagcccgccatgatgtccacgtgacaaaagccatgatatacatatgacaacgcctgccatattgtccctgcggcaaaacccaacacgaaaagcacacagcaaagacaaagaggcccgccatgttttacactgcggcaagaccttcagccgccatcttttcctgtgtgaccgcacatgtccaccaccatgctaaccacttaacaaagcctcgcccatcatgatgtggccttcccgccacttgaacactgcgacagaactggatccgccattttggacaacctaacaaagcacagcccgccatgctgagcaatgccgcaatgtcaaaatcgccattttaagccctgcaccttagtctttcctaaccttccatttttaactagtcccttgtactgataaaagatgattcttactgcctcccgatacaacaatcacgcaaagctcctaacaagccccaaatcaattcattcagataggtttagctcatgcaatgcacatgacttcctctgcctgacctgctatcatccatcttgcctccctagtttaacttagcacaaacgactagccctaagccgagttatgcggcaagtctaaaatggcggccacttttcctccacaatctgaacacgcccttagcttaactgcagagtcattctctgccaaagcggtaggtacactcacacaccaccaaatgatcagcagcaaaaaaaagtgtagatattccagagagtgcaacaacccacaaaaccaacattttttcatccataaaaagcaccgatgggcgatgaaaaaaaaaaatcaaagcaggtatccgcggccccgatgggccagaaaaacaaaaattaaagcaggtatccgaggccccgatgggcaaggaaaaataaaaaaaaaaaaagcaggtatccgaagccccgatgggccaaaaaaagaaaatttttaaaaagcagatatccgtcaccccgatgggccagagtgttgggggttcagaggggaagggaatcagcaggtatccgataccccgatgggctaaggaaaaaaaaataaaaagcaggtatccgcggccccgatgggcgaataaaaaagaattaaaaggcaggtatccacggccccgttgggcaaagaaaaaataataaaaccaggtatccgcagccccgatgggcaaaatatagaaaagagagtggaagagtaaaaaactgatccacaaaaaacagagatgtcaaccaaaaatgattccaaagaaaaattccttaaatattaaaaattgcctcaaaatattccaaatactttctttaaaaaaatatggaggacgtgtcaagaagacactaggagaaagtatagaatttaaaaaaatattttatggaatttaggtgatttttttaaagaaatacgccataaagggtgttgggggactagaaaatgttctagaaagaaccccaagtgcagagagatcttcagtcaggaagcttccagccccgagagagtaagaaatatggctgcagcagcgaattgcagcgctttaagaactgaagggggggctgagggcggagagagcataagaggcgtggcctagaagattgaaagccggacatctttgtgatttggttggttcaaaatttacccagtaaggacaaaaaagggaaatttcaagaaagcaaagacataccagaaagaacattaactggaagtagacttcatttctagaccaggagtcacaacttcaatgggttttccagttctcatctataacatggggacattgagtaaatcaagcaataattaatgctaaaatcctccataaactgcataataaatgtaaagatgttaattcagcttggttttgagaatgggggaagggataggtagagctttgatgtgttgataaagtatccaaatatatcattcaaaccagaatttgtaactcctccaccaaacttttgaaccaaagaagctagaaaggagtaatacattgaggttagtaccatcttcaagggacttcccattccattatcccatgtaatagataatggaatatgtattgcatagataataataaaggattattcctgttttatacattaaaatagagtcctatagaggttacatcatgtgcccgaggtcacacaccatgattcagagtcaatgtagtttttactccaacactctaccttgtatggctcccaaccataagagaacggaagtgcttacgagtcaattggtgagcaagagagaaaaaggaaagaaagacatttcatagaatggctatttggttcctaaataatcaagaaagagtactgtttgtgacctgtttgtaattttttaactatgactccttaatctttactattttcctatttcctccatgaatctgaggaacccaacattggaccaaccatatgacacagtagtgaagttgaccctctgtcagtaactgataagtggtaggaagaaaaagctcatataaaagccaaagctgccctcagaaacctggctatttcagtaggaagcaattaatctcataaactcttctatgtcattcgagaaacaacagagaaccagaagggagacaatggcaacttaagtattatagagcaacttctagaaagtcaaaggatacattaccctcccactggctgaactggaaagtgtaactatcgacccaaatctatcaggtaagcttgctcttcagtttccagaaaaataataaagtatgcaaattttcttccttaagaaataccttccatcttctaagtgtccttggatcaaacaaaaaaagtaatctgacttgtcattccaaatgagggttattgtattgtaaagtggtgcaatacaatggtacctttgagaaaacaatgcttaacaaagagagaaactacctacagtgacacctatgaagcagctatcagaaagactggattaccaaacctctaatacaactttatctactagaagtttctacaagtgtggaaatgttctatacttttaagaaatttggttggccgggcgcggtggctcatgcttgtaatcccagcactttgggaggccgaggtggctggatcacctgaggtgaggagtttgagaccagcctggccaacatagcgaaaccccgtctctactataaatacaaaaattagccgggcatggtggcaggcacctataatcccagctacttgggaggctgaggcaggagaatcacttgaatccaggaggcggaggttgcagtgaaccgagatggtgccactgcactccagcccgggcgacagagcaagactccatctcaaaaaaagaaaaaagaaatttagttggggaaaaattttctaaagactcaagtagcatcaaatataaaagattgataaatttgactctgaaattaaaaccttttgtttcacaaaaataccttttcaaataaaaaggcaaaaagacaatttataaactggttgtcctgggtttctgtgaccaggccctggttccaggtgggcagccacgctagcagatcactctcattggttgtcattggagttttttaaatggtaactcttaaggctaggcatgcaaaatggtgctgatgtgccgttatggggtgacactcacattggacacaggacatgttcagagctgtggcctacctaaatccactgttgacccttaggctaaagaaactgcaaaagcaagaaatttataatttcaatacaaagaggttccagagtgccattgcaaaaatggaagtagtacagtgttgctatgtttttctcatagagggagatgtgaaattagccaggaatggtgcatttgacaataaacacaaagagatgatttctggacctaaaaaggaagatatggtgcaaggtcattataaaaattgatatgtgaactgttgaataaacaaatacgtaagcatctcttctccacctggtattctaaattttcattgataaatcactacacctcacatgggcccatgtatttgtaatatatttttaatcaaactgtttacattaaaaggaacttctgaaaaatatttgcctaggcctttgccctagagcagtcctgccctcttctgccatttatcaccttcaggttttacttactcccctgccctcactagctttcaattcactttacttcctcctcttcccgacctggcctcaccttcactactgcttggctccattttataaacctgttaggatcagaagtatggaaactgagacactagaaggaaaagtgacttgctcaaagtcaattagctagtaagag

SEQ ID NO: 37 - DNA, 58484 bp, Homo sapien
cttttgaaacataaaactacactgttaaagattgagtgacagggattggtgtgattaatggcattcaagaagtaaagaaaaaagaaaaagaaaaatttaattatttaattaaataaaaaacctctacctcagagcgaaacaacgggtccgacctcacgtcaccacggtagaaccgagtgacattggagacggaggacccaagttcgctaagaggacggagtcggagtggtcatcgaccctaatgtcagtactcggtggtacggaccgattaccaacataaaaatcatctctgccccaaaacggtacaaccggtccgaccagtgcttgaggactgaatttcactttgtggacggagccggagggtttcaagaccctaatgtccgccctcggtggcacggaccggagtaaagaaaaaaatttgatggaattagtgggtcacacccatttaccaaacttcagagtaaagaatgtcgtagtcaacgaaaccagttcctatgactcttcgtgtttgggtcattttttacactcttcgttttttgaactcctagttttcaccctctcctcttcccatatttgacattccgacacccttaattcgtaagtactttctccgggtctgggactcatccacttccctagaagtcacaaagatcttaagacttactagtttatgggtttgtaatctaaccactgaaatatccgtttacttggtcgtgtcataaaaaaaaaaaaaactctgtctcagagcgagacagaggtccgacctcacgccaccacactagccgagtgacgttggagacggtgggtccaagttcgttaacacggagtcggagggcttatcgaccctaatttccgcacatcatgctgtcgtccgattaaaaacataaattaaatcatctctctcccaaagtggtaaaaccggtccgatcagagaattgaggactggagtttactaggtgggcggagccggagggtttcacgaccctaatgcccgtattcagcggcacgggtcgggggtcgtgtcataagatatccgttctcaaggatgacgaaacaacctttaatttgacctttgaccaaaaaaaaaaaaagaggtctttcagaattcgacaatacccgggtctaccaataagtcatatacttgaaaaaaaaaaaaaaaaaatctgtcacagaacgagtcggtgggtccgacctcacgtcaccacactagagccgagtgacgtcggtgacagagggtccaagttcactaagagggcagggtcggaggtcttgtcgaccgtaatgtccgtgggcggtagtacgggccgattgaaaacataaaatcatctctgacccaaagtggtacaaccggtccgatcagaacttgaggactggagtccactaggtggtcggaaccggagggttccacgatcctaatgtccacactcggcggcgtgggcagggtcatgtacctggaaattttggctacggacttcttgagaatggatacacaattgtcaacttaaaacagtaatatttactcatctcaaactccactatttcaactgggtatagaacccccaacgaagacttgaccctaccacgatgtacctgaaaagagaaatgagaataaagaaacgttccgacctacacatcctgtctccctttcgtccactccgccattcctctgaaggacttcaataagaactcacagaagacaaggaaacaggtagggagaactaaggaagtcgtctaggataagggtatccccgaatgaagtcaggggaacagtataaacgacacgaatgagaacacaaacaccacgaaaccaggagtttaaggaactaagagaacattttaaacttccctctcctttactttttgtggcatagaggaccaatcactcctttccagtctgttccgttaaaatatccccgtcgtctttataaatcttttacagtttcgtaaactatcataaaaagtcaaaaacataaaaaatacaccacacatacttcaccagtgacatacgaacatcaacctaaaccacggtcgggttgggtgtaggtgtttttgaacacggaggatagttaaatgagaaaatgggaaccagtactcttttccattacaatgactccggtcatctgaatccgttcgtagatagtaagtttaaagcttcaccttattaaatttaccccaaattttaaatcggtcggtaagataagtgacacttacctatccgtccttcacacgattagtatccaggttgaagactttttccacctccatcgttccttttggtcaacttcctggaatcatggaaagggtacttaatatcgtttacctcgtggttccgttaatgtaccatcgactcctcagtaatcaagagttttaagtttggggtgagtcgatataacaaaggtaaccgaaccatttccacttgaaaactccccaagaataacaatcataaaggacccaaacggtgtcagaacgagggtcatggtcgtaagagtcactgctcgaaggaaaatgggtgaggtcaaagagaagagacacatgagacctagttttatcattgaggaaagatctcacgatcttgttttcgaccgtagtgaactcccggattcctctcctctcgtttccctctcgtcttacgtttcatctcaccctttctttcaacctaagctcgtcggaacgtccatcgattgatgaatccgtcttggacagtgaaatacccttgaggcaccattcctttttttaagtattcgtctgaaacgtccgtcctaaagttttttagaatccttaagactgagtgtaatttatcttcttcttacagtttccaactcaccgaacactccctactcgaaactcacctgggatgaaatattataaggcacttctttactaatctatatagggtttctggatctttttgggaaggggaacatcggaaaaggaacgacaaaaaaaaaaaacaacaacaacaacaacaatgattacttaataagactttcatagggtcctttgcgttactgttactctcaccaccttgtctacacccaagaaagaccgtcacctgatataacagaggggcggagaggtgagggtctcctgtaaaccgacttcatggtctcaggttctttacagaacaatgatccgtctatcagagtagacgtatcacaccaccaaaatgagggagtgaagtcaaggtgacataaaataaaacaaaacgacgtactaccacaatcgacacattaagggtaacccggttaatcttaacacatagatttacgtgttttatttctactccgtagactttgggtctcttttattgaactagttacagcgtcgcgttttatcgactccactgggatctaggtttaagtgaattaaagatttgtttaagaaaagagtgacatataatagtatcggagaaaatattgcctatgtacgagtagtcctttctcgaacctaatactcattaaatgtcaatcttaccgagaaggattagtatcgattggaggtcacatgataaaatacagaaatacgagtgctcctttatttcagaatctcttataggtttctctccctaatatcattaatactgataattgaccatggatttaccctcgttacacttgatgaatttccttctgtgtccttctattaagtagatggaggctaaggagatggaaccgggatatgaaagatcgggtccctctatcagacttggttcacttttagtcaaaaagaagacaatgatgtccagacgactttgatattttcataattaaacggggggacatcaaagggtaacaatggagagaaaaatataggtaaaacactgataatgaaaagaaaaagaaaaaaaaactttactgcagagcgggaacaacgggtccgacctcacactaccgcgttagagtcgagtgacgttggagacggaggacccaagtttactaagaggacggaaccgggggactcatcgacccttatgtcctcggacggtggtgtgggtcgattaaaaaaagaacataaaaatcatctctaccccaaagtggtacaaccggtccgaccagatcttaaggactggagcccactaggtggacggagcaggaaggtttcaccaccctaatgtccacactcgggggcgcgggctggctgataatgaaaagatgatatttagttctgtttttccccgaaccccatccgtccccaacctcttgacccctcgtctgtcagagtcaatttggaaatgaacataaacgagtaccgacctcaggtcagcaacacgaggagggtaacactcgatcttatgagtgtcaacgatgaaggacttcttgaccttttgaacagacggtatcatagggtatcgtaaacctaacacctgtatcctcctgtcgactacgttggacttagacgtccctctatctggtactctgtcttccggccaacaatctcatggaacgtaccatggtaggatattacggtttggttagaagagtgacagtggagagtacaaacttattattaacctttctcgttctgaatcgtcccttatttcaatgaaaactcgatggttaaaatgatgaatttttcaccacttatccatctctacctaaggtcaacaggagtggtatcattcgacaacggaggttttctttctcttacttggttcttcttatatcacctgtgacgtatcataaccgagttgatctaagactcttttccctgaaagacatttccgacgatggaccagaaactatgtcgttgatctgtacataaaaccccaagattctattccaaaaaccgagactcgtcgtctctcgactcttcgtcctgtacttcttaacctgaatggacttgatatcggtttacctacactggcgattaacatctaccgtccgaccgaaaactctcttgggtcttacttatcatttagagtaaaagtcgtcttctctcagacgatactccaagtgtcttttatcgagatcattgttgtcggggtaacccgtgatctaacctatggtcaagggtatccattttgttattataatcgataagacgtttgcgtttcgttttcgatttcttttagcgattggttggtactgaagggaaattttatgtcagacctttgtcttcagggaaataaggaagggaaactaaagaacgggaaaaggacgtaacgatctattccttacgttaccggtcttccttcccacctattagatttaattcatcgcttataatctcttacaaatgtattaccacaacccgcccccctgtaaatcttatcggggaagtcatcgttctaatacgattcatttcatgaacagagtagaattcgataaaaacaactctgtccctgacacgtgtcgagggagagattacggttaggaacgaattaaaagggaggttgcttcaaagaatggacaaggagaaatcttattctttacgacctccttaccagtcgcaacttccttcattcggatattcccttccgtgtcttctactgtagtccgaaatcttatccatccgtgtctttctgaccatagttcgttctccagggtataggatctccaagttttgtctacaagtgaccatccctcttttcacccgtctaaatggactatccgactaatttgtctatgtttacggtaaatctacgaagatattgagaacggatataagactaaggaagagtggaatcacaaatatcgaaaacggggtagttgacaaaagagacatgtaaaggattattttagagactttgtggggttagagtaaaaatatctcgatttgaaatatattcatctcgacagatcacggacacaccacactaaagtatgttcttccggaagaaagggttcggatataaaagggaggaaccatcgactacagactttaagacaatagacctctgcttagaaactaagatgtaattcactatttcgtccctgttcaaataaaaacatggattgttttcatggaaagagtatcaccttttacggacagtttaaaaaaccttaatataaatttgaagtcctgggagatcctttcttttgttctgaaggtaaagtgtgaattccgttctagtcgattatggtattatacccacctacggtgtcaaaaaaaggttgagcaccttttaaagtaattaattagtatcgtaactaaggacaattcggatcattccctgtttttacgagcaacgggtggttttatgtaagagggtaagaacgaactacacaccgacgggtcgatcccatgtaaaaagtcgaagaaaacgtcaagacacgtcggtttactaacaatactagttattttacactcatcttcactacatacggtaaaggtacggacccaggattctgtatcccatacgagaggaaaggtatgaaagagggtggtcgacgttgagtctacattaccgatgggtcaaagtcatatgtctaccctcactaagggatactctactttcatgttactgaaccttcctttagttcagggacttactgattctttgtcttaagggagagactaaacttgaaaaatgtaactatgacagtacattctttattaattgtgagaaaaacaaattaggtaacttaacaactaagagaaaggatatcatcggttaaaaagaagagtattgattaagttgacctacgtaggggtcttaggaagtgcatcgtaaagtccaccgacgatgattattaaatctcaaccgtacgttctattttaaataaatggtaggatcgtgatttccctatttagcgactgtcgtctaggataaaactttcggctaatacttcttcgatctcttgtcctcagagactcttcttcctcatggtatgtcttcccttatctataattttctctgactctgttatgtctggttggaatggaagaaatattggaagggaatccggacgagataccaagtgttatgtccaccctttctacacgagtctctttaatcccggttggtctaccgacctaccttttcttacagaatgtactttatcaaagggaaccaccgttacgatccctctctcttctagttattacttttttcagttttcttgataggtcgtggtcgaatccttctttcgtatccagaacgtttgttcagtcttgttacagattcttaaacgatacaattcaaaaaaagaaggttgaaaataaaatccaagttccccatgaaaacgtcgttttcggttacccatttaaaggtacccatttaacacacagtacccgaaactacatgtttactaaagtaatgtgaccatcactcgtatcatggactatccatctaaaaaactaggagtgagaggagggtaggatacaattagaaaattgtagaaaccttttattcttaaccgtgatcgaatacgtaaggtcatcgggtagatgtattttggtcactcccccggagtactatagttctatcacctgaattttctttaccctatgcatgacaagtagaacaaatcagggaaacacaaacaaaaagtcacaggatttcacctataattcgttcgactctcattaaactcatggcgaaataagacaccatctcaatggatcttttgtatacccaactcccgtacattagtacagggggtatagacacttttacctgtcattcttcaccatttgtaacaatccccgtcccaaggtgatcctttaaacctatttctctttacatttaaagtataaaagatgagtatccggtaaaatggtaatcgtcattatagatttatgacttttgtcattaatatcctttagaacccttgattttcagttgaattactactaatattaaaaggatctgaattgtgggtaagaaaaccatatgactgtcagggattactcctatgttcggtaaccagattttatccgtaacgaacagtgttggtttaaggagtaaatacagttacagacgaaattgattcaaggaaaccgaagtatagatatatcggaaaggttggtcactttcacagttgtaagggtgtcagtcgacaaaggagatattgaagtaaatggaaactaaacttaaagtaaaggtcgtaacactgaaatcaaagaaagaactcgaaagtaaaaataaccggttaagggagaaagtaatatacaaaaacaatttacagtgaacccaaatagtgaccgtctgtttctccgttgtgtttgtgtaccaaacaagagacgtgtacatgacttatcgactattcactggtcagtggtttctgacactttcttcactacactaagtattaactagtactacgtgtagacaatcaatatatcattaaatgtatgacttttggatcgtcactttaaacatgaaataaattatagtgtcagttatatggtaccattgactttaaatttgacacaacaaccccatgaacataataaattgatttggtaccacgtttcactccttatagactcagaaatgaaacttataactggtgaaatcatacaaacacttatatatacactttaacaaaaaaaatttgtcactctacagttaacatccgagagtacaaacgacaaaatttcatctacaagctatctcatattagtgtacatctaaagttatctaccgggatagatgttacgtgattgacagtatatgatgtgcacctcatttgttttttcagataaaacgataaagtccctacagttccggtcacagaagttccccttaagacatcgaaacatgtatttctttgggtcaatgtggttttgtgagtaacagatggtctggaagaccctaattaagataagttctatcgttctttttaatgattcggtttgttttaaaacttaacggttagtctttatgtcagtgtttaacctatttataacagtaccaccagaaaatttggaatgaaagtcaaaaaaaaaaaaaacacactcaaatctagttattgtcctgaatctccgaaaatggaagtttctctttcactggagtacaagggttactgatcccggagaactctccttcatacggattattaattttcgtttatgagatcccgtagtaccgggttataccatcgatgatcggtatatactgataactcatgaattttacaccgatcatgtttaactctacataatatttacattttatgtatgacttaaatacttaactaaaaatattaatggtgtacaattttattataataaacctatgtcatcaaatttaatgtatataataatttgaaagtttttattttgtttatcctcaacctttcgataccgaatggtggacaaaaacaaacagggtgttcgattgttacccaaaaggtagagatttacgaatttaaaaatttccttataaaataatgtacacttttaatatactttaaatttaaagtcaaaggtatcatgaataaccctttcatggtacaggtaagtaaaagtataacagataccgacgaaaacacgatattaccgtgacgactcatcaacactgtctatcgtataccttacgtttcagatatggtcaataagagtggagtcccgttaaaatggaggataccctgtagatctttacagaccttttacaaaaataacagtgttgactcttattctacaataaccgtggatccctcatcttcagtccctacgtcaatttatgggatgtcacttttcctttcgtgaggtgttgtttcttaatagaccgggttttacacttatgacaactccaactctttgggaccggattagatgaataacagaccgggaaactccttttttttaaagattggagaacagatttttgttcagtaaaaccaacccgcgacacccagtacggacatcagggtcgtaaaaccctccgactccgtccacctaacggactcgaatctctcaaactctggtcggacccgttttacctctttggggtagagatagtttttatgttttttaatcgacctgtaccaccgtgtgcatacaccaagattgatgaaccctctgactccaccgtcctactggactcggaccctccgtctccaatgtcactcgactctaacacggtgacgtgaggttgtacccactgtctcccttctggggtagagttttatttatttactttatttttgacaaaattttgatcctgaacagttgtctctcagtttgagatattttataaacttctctaaataagactcggttcatttatactcactggttatcgagtactgtgtcgaggttctctggactcttgtacatgggtttcatcagtccgatgtcgaaccaaaatatgtaaaatccctttgtattctgtagttagttacgtacattctacatgtaaccaacccagacttttacaccctgttgagattcacccccgaaggtccagtatccttctgagtctccaaaagactaatttcagaactttagttatcttccctcatagacgtaattgtattccccgaagactctgattccgagaatacgtctacttcggaggtccatcctccgaagtctctcttatctaacatttacaaagaatagtctgaatttttccatggtctgagaatcaattaagagaggacctattcgcttttctagacctttcccttcccgtaagagatgtcttacatccaaaggggtgttctctgtcgaaacgtcccggtaaatttttatacaacttatttatataaaaccccggacgatagacaacacaagtatagaataacgatgtttctcagatgaaacagttagaattccagagacaaaattacaattacaaccagtaaacacagatttaaggtttccctcctcctatattactccgtacggactggtgggtgaaggtagtaccggacttaatcagaaagtccaattgaaatcttacgggaaccgactctcctccccaggtaagtcaaccaaccccccgaatcttaaagtaaaaaccaaatgtctggaatatataagaataaataaaatgaatcaatataaactgataagaataaaggaactttctcagttcttaacggttctactttgtggaaaccccatagacctgtccaaaatggagacagttgggaacgttcttttaatcttaactgaatggaacccctacctcttatccactgtgaacacttacttcttttataacatcacttccggaacactaacccttttagtctcccgaaccactcccatgtttacaaccgacaacgacttttccgaagacactacctctcacttcgttgaccccacgtcaccccaccaccgtcaccacggtcaccacggttaccaccatcatcgacgactcacagtccggagactcgggttcggacgtgtatatgtaggtctaccggacttcgttgacttcttagtgttttcttcacttttaccggctaaggacggaattgactactgtaatggaacactttaaggaagaggaccgagtcttcgagggggtgactcgtggaacactggtgatggggacggacggtctcttgttgagggaaactaacattaaaaggtgatggatgggtttaggatattttgacggggtagggatagagggaaacgactgaaagaaaagtctgagtcgggcggacgtgggtccactaatttttcgaaataacgagtgtgtttcggacaaaccaccagagaagggtgcctacgtgcactgtaaaccacggtattgagtctagtcccctgaagggaaccctctagttaggggacaggaggacaagaaacgaggcactctttctaggtggatactggagaccaggagtctggttggtcgggttccttgtagagtggttaaaatttagaccattcgtcggagaaaaacgagagaagaggttgaagaaagtgatagggagttggagaaagaggaaagttaaagacacgatgggaagttagagagggaagggaattaaagtcacggaaaggaaaagaccatctctgtctcctctgtacaaaatacacacttgggttttgagactgctaccagtaccagagcccttctgtcagaagggagtcacaaattagtgacgcccctacggacggactaataagtgggtgtaaagtctccacagactagtggtacccctacggacggaactaggaagtggaaccaccgttcgtggtggaggggccctccgttcatggggggtggggaagagaggcacagagatgggagagaaaagagtcccgaacggaggaagtgatatccgtttgaaggtgggaggtaaggaggtagaagtgggaatctgacacaagagttattgaattttggagaagttgagtgtggactggattttggatttgtagaataaaagaagacgttatggtgaactggggttatgtttgaactgttaccaaggtttatcggtcttttgtcgtgaaagctaaagaggtaggatgttctagatctattaagaacagcattttacccgtttaccagactccacggactataggtccttaagaaaacgtgtagtcagggatagccccctggacgggactattagtgcatccaagaaaagataaagggattcgtaactgaccgaactctttattttcctgtctcatgttttctctatttaaaatttcgacccgtagaccccctctgtagtgtgtagccatcctagacactacggggtgttcggtgtttttggtcgttcaaaaataatccctaaaagtcttcccctccctcacacgcttatccacacccactgtctgtagttcatgaattgtcccattatcttatagtgttccgttcacctccgtcccactctagtgtcctggtgtcctggttccactttaattttaacgattgcttcaaatcccgtggtgacagtaactattatagaatagtcctctgtcccaaaactctagttggccagactggttttaaataatccacccttaaaggaaaaagattattcggaccctcgcgataccctctgacctcaaataaagtggggacgtcagagttggtattctctgtccatgcggggtccccccggtcaagtctctggatggggatccacgcgtaagagaaagagtccctatagggtacgactctttttcttaagtcgctataaagagggtaaacgaaaactttcttctcttcataccgagacaagacgggtcgagtggccgtcagtctcaaattccaatagacagaataagggacttgttaacgacaataggacaagtaaaaagtcccacgggtgtaaagtataacgagtttgtgtgtacgacatgttaaacacatcaattacgttaataatgtcccaggactctgttatatgtaggaggagttgactgttctaactctaatttaatttctgtccgtatcctttagtgttcccataactaaccccttcactattcacaggtactttagaaatgttaaatacaaatctctaacgttatttctgtccgtattctttaatgttttcataattaaaccccttgattatttacaggtattttagaagtgttaggtgtaagaagacggtaccgaagtcggccagggaggtaaaccccagggactgaaggacgttgttcagaaaaggattagagacgagggttacactgagtagggtttagaaagaagaaagagaggacagagaaggaagtcagaggtggggttcgagactcaggaaacttaggaggaaaagatgtctgggtagactggagaggggaggaggggtccgacgaggagtggtccgactcggtccagggttaaaaaggagtcggagacgagagggtgggatattaggaagatagtggaggggaggagtgtggaccaggtcgaatgtcaacgcaagacaccgatcgggagggggtagatgggttgtcaaaggagaatgtctccaccgacttcgacttccgtatcagttccaattacgaggaaaaagaaatcgactggagagggtttagtcaatcacaaatccgagaaaaagtagtatatatttttgggtcgggtcaagtaccgggtaaaccgttgttgggaatctgtgaaatggtgggatcgatctgggtcttcccagtcttccggcagagtaagagttatacgtaaaatagtgggtcagtcgaggactgtaatctttttcgaggtttttaatctgaggtcgggagtttggggtgttgtccttaattagttggagtggacgttccacatgttattatctcttctcaacgttaatgaacggaggtgacactctctttggggtcggtgtagaggtcgtgtgttcttgaagtatcgtggattcggtgtcgtcagtccgtaaggaaggtctggaggagggggtcctagaacgaagtgtgcgacctttagaccggtgacccggttccttacgacgtcggaccctaaggagcattcggtacagggtagatacgtcctggggtgacctttatcctaacaggttgagtggaccgtcgatgaggatgtcggggatttcgagaccaggttccgagagactgactgtgaaagggtctagacgaaccgaatcgtcgacctctgactgcgacggactagtggagtcttcggaggacctggtagtgtctgtgaaatccattgagaatgtcaccttccattcaggtaggggaagaattagttatacctccgatgggtgaggtgtaatggaaggaaagttcccggacaaagggaacgggggtattgccaacacccataactgccggttcgaagttttggggaattttgagagggtgagaccacggttgaacctgttgtaagaaaatacgtgagaaaaagtcaataagggtggacgggtcaagagaataatccggttctgtaaaattggtttaatagatgaagggaccgataaggacctgatgtcggtgtggagtaacggcggaaaaggggtcaagtttcggaggaagcgtaggaggggaacatagaggggtggaattaggtgttcatatcctgtggaaatgagggaggaacccctggctagtacgtggggaatcgtagggtaattttgtgttagtgggaatggggcgagttacggttatagggtagggtgttgtacgaaatttttccaatttcggacaatagtgagcggacgacgtcgtactcgaagacttcggatatttgagaggaatgttaagagggtaaaatggacaggtttttggcctgttcagaatgtccaatcaagtcctagacgtggaatagttggtttaacaaacggataggtggggtaccacggtttgggtatatgagagaataagaattatggagggaagtgttggggaggtgttgggtaataatacaagacctagagtttatacgaaagaaatgataaggaaacgtgggaaggaggttccgggagaaatgaaaatggacctgactgggactgtgggtagtcagagtcgttgaatggacccgacatgacgacgttccgaagtccctgtcgaggataatgaagtcagtccgggaaagagtactaaatgagagaaaggtaggtagatgtagagtggaataatttataaaactactggaagatgaaatatcggggaggatgtttagaagggttgtcctgtgggaggacgacgaggttgttagataagagttttcctgtaacgtgtagacggaggtttcgggtttaaagaaggagtaggcaatatatagaactgtattaagaagtatttttgtgtgtacgagagggacgactagcacagaccgattagagggtttggggttgggggaactgtttcgttgttgaggaaagaaaggactcgtaccaagtcatgaaaacggaaatttatggatcgaaatgacaggactgatttggtaatatatttgagtgttttcttttggatcgactggggtatctaggatttaggaaaggggtgaggaaaaaggtaaagaattttgtcgggaccttcgacgagggtgtgatcgagagggattgagtagacttgggaaaaagtaatgtgtgtcgacttcacgtcccgacacgccagtcttaagaatgtgttctcggtcctggtactggacatcggaaagacaggttcgttgaactagaatgacaaaatccgaccgagggtgtaataaggactatggtgtggactgggggtactgacatagaaagactagatggactgtaagtgaggtaaatgggtataaagtaagaaaggacaaggagtgggactagtgtgaaccaaataactaccgtcaaggtagtccggattaacagtgagtaatcgtttccgtccgatacgatatcatagaaggtgtagataggaactacaatggtgagacaggtggaggtgatggacagtcgttcggtttgagtaacggaattgagtccgagagtgagaacgtttccctgatgtgtagttataaatatgactgagatttatacggaaggtataggacgtggtggtacgacaatacatccgattttctccaaaggagcgatacgttcacaggaggtagtaattacggagaaattatttttgagaagagttccggtgaaatgaaggtttccttcgacctcagtaagtgaggttcccggtagttttccgtagtctagggtagtgagtcctgtcacgaatacgactattccatcgatttcttcgtcgatcacagggttgaagacagggagtaccggtcaaaaagaggaagagtagacagtgagggtggatgagagggtgactttgaaggtggatagttagagaaaggtgtgttccgtttaccaagaaccttgttccttttatagaggaaggtcggagtgtccggataagataagacaacagtaaaacattggggaaggtacattcaacgttcgacgataggacggagaattttggagagtaaaggaaaggaaacatttttagataggatttttttagtgaagagacagggtagacgatatgatgatgatgagtccttaaggagtccgggggagggaagggatgtgtagttcgagctcttaaacgggacgggtcctgaccgtttaactgaaatgagtgtacggggctcagtcctttgattttatggagaaccagacccatctgtgaaagtaacctacccatctcctgaaagggtgtcccagactcttccggtggtatcagtaaagaagggaagaaagtctgtattaaggatccgaaccggaagggtggagatatgtcagactattacctggccggaaataatcagtttagtgggttcgtcaaagagtccgagaaccataagtcaccttggaagtatggggaatggtaagagttagaagtcctctccatcttacctgattaccagaaaatttctgtgtagagtggttcgagtcggaggttgaattttttctaacctgtcatgaaaatggagaacggaaagagtcttaatctcggacaggaactctacgatctcccatgtcaggtaaatttgaaaatatatctgtgtgaaagaacgaaccggggttggagcagagtctgtggtcaggagatccttagatagacgaccaggaggtcgtccgttctgtcctttaaacggttcgacgattagaaaagaacggatgaggtataagggtcggtatatttctgtgggatctacctgctagtcaagaacaattcttagactggggagtttgagatattggaactatctggcctgggatgaatcagtagatattatggggttgacggtaggcggacattctgggagggataatccgagtggtaaggtcttatttcgacacaggtaacctgtcggtcggattagagaggagaaggaggatcttcaacgttcatgagttgggatgaagggaatttgagtgagtgtaaagacttcttgtcatcattgggaatactcggattttgtaggaaagtaagataattcaaataatgggatgaataacgttgttccgaaatacgtcagtgggggtgatgaacctgacgttggggttttgaacagtagggatgatagaagacagatcagtatgaggataagtggtaagagttgatgagcatttacgggacgggaacaaatgtgacggtcaaatgtgaaaaggaggtttggtagtattgagtatagaggaccaaaatggagtttggtggaaggaattcagagagaacttcacctatcttctagaagtcactgttccatgtgaggttatgaaagtgggattatttcaggataagaaatggaaatataagtgagaataagagtaaggacaagaatacgctgggagatggagaggggtcgatagaggtggtgtgatagttagagtaagtgagagaggatcgacaaagattaggaagaaattttttactaacgaccgaaacgtaaagagaaaggaggttttagtgactccggaactgaatgacgagtttttttcccctgacacacataaaaatttacttttcacaacaaaaatggatttagttagaccgaaccatatactgttgtatttttttgagttcctatctcgggtttttgagtagttggttcttttattagtgcgacttgggggaatccgtgagactaacctacaggactcaggagggttaagaatcaggaaattatggacaaaaagaggaagacaataaccctggaacacagaagacaaatcaaagagttaagtatgttttgacataggtccggtagtggttagtaagatacactgtttataaggaagattgtttaggtgttatagtggggaatggtgttttagaaggaagtcgaaatagagagggtgagatccaagggtgcggtggggattagggtgagtttcgttgggattctttgtagtgggtcattgagaggtatggtggggggttttttaaaaagtggcggggttgtgaagttgtgataaaacaaaataaaaagaataattatatttttctgtccttacagtccggagactcgggttcggacgtacatatgtaggtctaccggacttcgttgacttcttagtgttttattcacttttaccgaccaaggacggaatcgactactgtaaacactttaagtaagaggaccgagtcttcgagggggtgactcgtggaacacaggaggtggggacgggcggtctcttgttgggggaaactgtcattaaaaggtgatggatgggtttaggatattttgacggggtggggatagagggaaacgactgagagaaaagtctgagtcggacgggcgtgggtccaataatttttcgaaataacgagtgtgtttcggacaaaccaccagagaagtgtacctgcacacactgtgactcctacgacgtaaaacgaaagtactagggtttctgggaaatttttctttctcagtcctttaccccaccccccatatttctcttttatattgtatcttttgaatttatctcgtacattgttaacacacatagagacactaagaatatgagtttcctagtagtgtcttagaaccttaaaacatccttaccgtttataagactactggacgatcacacaatcggtcatccccattataactttgtttcattaaaaacgaaaaaacatcaaaccgactccttttccgaattttgtgtaatcacaccggtaggagtgacgatgtaagggtagtcgtggtactgtcaaatgtttacggtaccgttacagtccttcaatgggatataccagattttacccttccgtacttgttaggtggggaacaaatcatatagtagttctttttttgtgtttttacccgttggtcgtcgggaaccccaatgagacagatacctcatcggtaagacaatgaggaaatgaaaggattatttgaaccaaaacgaaacgtgacgcctgagcgggacttaagaaagaacgtgttctaggttcttgggagaggacccccggacctagtcctaggaaaaggatattgtagaaagactaatagtgtcttccctgatatcacgtctttatggactgggtttccaattaaaacccattcacaacccccaggatattgtagaaaaaccgttggtgacttcactgatattacgtctttgggggttaggtttccgattgaaacccattcaccaccccggactattgtagaaagaccactttgagcttccctactatgactcctctgggggtcgtgtttcctttatctgacgtcgtaatgattaacctgttgaaacccattcaccaccccatgagtccgtttcctaccctaaccaatatcgagttgaatcccctcaatctcagagagcattctctcccaatttcgaaggagagttattttccgttcctacgaactgactgtgacccaatctccgggttgaatcctcctaatctcagggaaaattctaaatcccccaatctccagggagagtcatttcagggagaggaatttcagggaaagccgattcttgtccaaaccgtaatatcctacaattggcgataagagaaacctaactagacggaacgtgagaaacgactaccgataccaactgtcttaatccgtacatctcctaacatcttgtacccctcgaaaagggaggatttttccctttactctcgactaccctgacgaccttttttaggcaagtactgactgttcgtcgacgtacttgaaaagtcacaacgacgttacccaccccgaaagagaccgtgagcctcacggcccggaaggggtgggacggagtccgttacgaaaggagagagagagagatattttgaccaacttacctaccgtttttagtgacaagtaaaggagacatttcaaaactaatcacttttttacctaaatactccgatcagaattcaacatcgtttagacaacacacagaaagacataacaagacagtatttctccccatagaatcctatcttgtactcgaatcctgtggacatttggacgacaagttctaccgggtcatttaaatagtccatgtttgaaacgacgtccagggacttttttgacctactccaaaggaagaacaaaacatacaggaaccctcgaactggaacattggtacaccgacacgaaaaagaaaagtgttaccaccggacacaagtcccaaactaaggacggaatcccctattcaggaaatagaagaagacacataaataaataattaaaaaactctgtcccagagggagacagtgggtcggacctcacgtcaccgtgttagaaccgagtgacgttggagatggaggacccaagttcgataggaggacggagtcggaggactcatcgaccctaatgtccgtaggaggtggtacgggtcgattaaaaacataaaaatcacctctaccccaaaatggtgtaactggtccgacgagagtttgaggactggagtgcactaggcggacggaaccggtgggtttcacgaccctaatgttcacactcggtgacgtgggtcggacagacacataaatatacacaacacacacactatattttttcgaaattaaccaagtttttattattcacgaatttagtctataaagtagtcttttgattttacatattacggaaaatcaagtaaactgaattcattagaaaccttttatcttttatcaaaatttctaatgactattttatttttatagaagtttttacatttgtaaaccagatttaatcagtccagtctataattcaaacgattgatgaaattccagtatttgacgaaggaactgaaaacttttaataagttacatggatggaacctctgtaatctaagatctattccagacccctgtacacctctcggtccgtgggatcgacatgacctttctcagtctggaatagacgtgaagacgaactacacaggatccgatccgaggtgtgatcatgtatttattttagagaaacccggacctaaccctggagaaaggacattgttaagatcttgaaaccctccggttccgtcctcctaacgaaccccggtcctcaagttctggtcaaactcgttgtatcactctgggacacagatacttttatttttttttaatttttgatcgacacacatcaccgtgtgtggacatcaggattgatgagccctccggctttaccttcctagggaactcgggacctcaagttccaatatcactcgatactaacacggtgacgtgagatcgggtccactctctattctcggacagagtttttatttttttaacgtctattaaacatacctcactcttcatcctgaatctggaaaacttgtgacagggtcaatggtacaacggtaggaagaaaagggaagggagattaaaaagatatattacagatttttattttattcttcggatcttttagatgtgagtttcaagagtcaaaacctcactagtttttactaatattcacatttataactttttcctcctgaaccctagatagtttcctcaagtgacttgacagtttcataccttatttttgtcatatcctttactctgttttttcttgtttcttttattttgtttctatgtcttcttgaacttctaacgaaacccctcctatcctcgttttcacttcaattcgtaataatttgtatacatttctatccggactacaacaatggtaccaaccccaaaggacattatataaacttcattacagtaggaaggtagaaggattatttagaatgaacaagtgactagtgtagtcactaaagagaattaaagaactgaggtttcatctatataaacagtcaaatacgtctaatatggacgtaaacaccctaacaaactaattatatacagaagtagggagaagtctgaccttcgaaggacttctgtctccggttccagataaaattggtggaaacacaaagataatggaccgtgtaagtccgagagttgtttatgtacaacggacttacttacttattgggtcgttaattcgggttacactatagatccaatgaccaggaccaaatcaatcggtgacaagtgttgggtgtacaagatcgaggtatggaaaggtagagatatgatttcttaggtgaagagagaataaagtagagatgtcatctctacgagtttcccttaaaaaaaaaaaatctcttcagagggagaacagggggtccaaactcacgttaccgagctagagtcgagtcacgttggaggtggagggcccaagtttgttaagaggacggagacggagggttcatcgaccctaattcaacggacggtggtgaaggccgattaaaaacatagaaaatcatctctgttacaaatcatctcagtggtacaaccggtccgaacagaacttgaggactggagtccactaggagggtggagccggagggtttcacgaccctaatacccacactcggtgacgtgggccggaaaaaaaaaaaaccgagtttcccttaaagaagtctgaaagacaaaacccaagtagtgataaattaaggggttaggtgatatcagtcggatggtgagggtgttgaggtggctatcacaaaactatttttagtggttactagatagattccctgagtaatacgagtagatttgaccgtcgaccgattggacaaagacaacaatattaaggagaagagagaaaattttttgaggacggagagagggaatcaacgacattgtatagtgagataaccaaatggaaattggagagaccgataataaaaacttggatgaacccgaaaacgaacttcccaaatgacgacagaaaggtctaatttcacaaaattaatgtcttcgaaatagaaatggtattatcttaattttgtaaacgaatatgatactattcttactatttataatcgttactctttcttaaataactacacatctatttactccgttacattgatattgtgatggatctatttctactaaggtacaaaaggactaaatcaactttgactaatagaccgactcaaatctatcaaaagacgggtcttcggtcttgcaactgatccattgaatattctatgaggaagatagggaccgtaagatggtaaatatggtgtaaaatacacataaatttttataggtcggtatcggtcagtgagaagagtgtaccacctgtcaccaaggtgaaaattaacgaataaatgtttctctaactgtagacataattcgagatagagtttctacaaaagtacaaggaagaggtgtaacgaacacactcagatttttttttttttcttgtcgtttctctatcgggacttgttacgatataggtgtaccctggacctgaatcccttactgtatttttatcttaatccccaacactaaaggtgatcgatgaaacgacagtatctgacgtatagtagaaatatactttaacggaaggtagatccacaatatctgacttaacacaggagagttttaagtatacaacatccagactgaggtttacactgacataaacctctatcttggaaattcctccattaattccaatttactccagtattcccacctcgggattaggtcatcctgaccacaggaatattcttccacttctccgtagtttggagagagaggagtgtatgagtctccttcctgtaaacttctgtgtcactctttcgccggtaaccgttcgttccttctctctgaagtggtctttagtttgaacgaccgtgaaagtagaatctgaagatcggaggtcttgacactcttttatttaacaataaattcggtgaaccagactataaaacaataccgtcgactccgtttgagtatttcatccacttccacaaaaatgtctcttcaacattttctatgtgaaaggataggtaatatgtaatcagataaggtacggaggagaagaccaacacagatattggaggaattaagggatatttcctatatacatgtatcgtgatcttagtgtcctcgtaacatatcaaagaaagaaaaaataaaaaaactctcttcaagaccgagatgacaggtccgacctcacgtcaccgtactagaaccgagtaacattagaggtggaatacccaaattcggtaggagggtggagtcggaggtctcatcgaccctgatgtccaggtgtgttggtgtggtccgattaaaaacacaaaaacatctctgttccaaagtggtacaaagggtccgaccagagcttgagaacctgagttcgctaggtgggtggaaccggagggtttcacgaccctaatgttcgtactccgtgacgtgtaccagtaacatgtaaaagaattacgacgacattgtttaatggtgtttgaactcccgacttttattgtgttaagatctacagtcttcagattttacgtagagtaactcaattttagtggtacaaccgtcccgacgtaaagacctctaagatcccttcttaggcaaaagaacggaaaaagtcgaagatctccgatgagtgtaaagaaccgagtaccgggggaagaagatagaagtttcggtagttgacgaccatcagaaagggagtaacatagtcagactgtgacttagaggacagacggaaaaggtaaatattcctgggacactaatgtaacccgggtgggtatgtttggtcctcttagagggtagagttccagtcgactaatcattggaattaagggagaacggtacactatatcatatcaatattcaaaacctctaatgtcacatctgtagaaataccccgtaataagacaaatagtaactacagataagtgtaattacgtccattcttatacatatccataatattttaactattaaaggtataagaaggagaaagggtgtaaatttatgacttatgattaaaaggaagaaaacttcgaacccgggtaatgatgtaatcgtgataatgaccactgaaatccaagtagacccgtgtcactcacgttatcctcctccctacatctcatgggtagtacggtacgtgatacttaaacgcctatgtccgattagtttttaaaaacggaacccgaaaaaaaaaactctcgtcctctctaaaccatagttacataattttttcgtgaacctaatagacacttaagatatacttattatatcttatataattgtatataattatacttacattatatatattaatatatatcttatatatattaagatatcgtagacacttacgatatcgacccaagtgggacggggaatctttgtttcttgggtcttagtttaaagatccagagttgaagttcacggagagaatctattatttcacaattcatattatacaagagtcaataaagtttacgacggtcacgaaaaaccgaagtcgattagacaccgaactgaaccaattcgatgagttaattctcatttataggtgggaatggagtcaggaagtttggaattaagaaagtattaccctatttttgtgagttactatttcaaattgggtttccatctgttaatcttttcgaatagtcgacacccattttcgtgtaacaaaagggaaaagggaagggaagggaagggaagggaatggaagggaagggaagggaagggaggggaggggggaaaggaagggaagggaaaaaagaaagaaaagaaaaaagaaaagaaaaaaaaaactctgtctcagagcgagacagtgggtccgacctaacgtcaccacactagaaccgagtgacgtttgaggtggagggcccaaggtcgttaagaggacggatggaggactcatcgtgcctaatatccacgcacggtgatacagaccgattaaaaacataaaaatcatctctgccccgaagtggtacaactagtccgaccagaggttgaggactagagcactagacgggtggagccggagagttgcacaaccctaatgtccgtactcggtggtacgggtcgtacaaaagatcgttctattgtttcttcccacgtaaacctaagaacttagaataaggttctagttgactcttaaatcggtattcataaaacctttcaataaggtggaggaagtttaacccaagagatggaatatataatgtattgtttacttgtgtgaaactatgaaaagggttgtttcggaaacctatctttggttcttcgaaccaaacgataaaagtacgaataccgtaaacgagtggattgaaaatcaatactggagttttcttttccgggaggagagaaggagtgtgatgaaacgagtaatatacactttaagttgacagggaaactccggttgatgattaaaaaggaaagacgaagggttcttttaatctctttaaagtcttaagtttatactgttgaaaatgttcagtatccggttggtagttcaacagtagacactatacctttccccttcccctacctagatccaagtagttcggtacctaaaccgtgacgaactgtgttattcggaaggtctacagaaatcacttaagtattaattttatcagttttcctagttatggaaacttctttgttaggttcgaggttccccgtcttcatccgactcatcagtgaaatttaagttagttatgtaaattgtttataagtaacttatgtataatttaccatcacaatccgtgaccgattatttggttgtctgtaacatggaatagtttaccttgaatactagataactccctctgtccgttattggtttttttttttttttgtatattaatatgtaacactattcttttaatttccctttctttatcctacgttactgattattactttttgtcgtataaatgaaatctttctcactaatctcttctttagacacttttccatcataaatttcggtctacacttcccatttttcttcggtcggtcggcccgtgccaccgagtgtggacattagggtcgtgaaaccctccggctctacccgcctagtactccagtcctctagctctggtaggaccgattgattgtgtcactttggggcagagatgatttttatattttttaatcggttcgcaccaccgcacgtggacatcaaggtcgataagccctccgactccgtcctcttaccacacttgggtcctccacctcgaacgtcactcgtctctagcacggtgacgtgaggtcgggcccggtgtcgctctggggcagagttttttatttatttatttatttatttatttatttatttatttattttcttcggtctgtaacttcggtaggttcaaacgtgaaaggtacattacattcatttcttggttaactccatctatctccagtcctttgacgtcgattacccggtttagactgtacgacgtaggaaaaaatatcggaggttcgattcttactagaaaatgtaaaaataactaaaaaaaaagctcaacctcagaacaagacaacgggtcctacctcacgtgaccgcgctagagccgagtgacgttggagatggaggacccaagttcactaagaggacggtgtcggacgactcatcgaccctaatgtcacacgtggtagtacgagtcgattaaaaacataaaaatcatctctgtcccaaagtggtacaaccggtgcgaccagaacttaaggactagagcactaggtgggtggagtcggagggtttcacgaccctaatgtccacactcggtggtgtgggtcgactagaaaatgtaaaaatttaccaaccttctttttttaatatcttataaagtactgtttgttttttatataatttaagtttaaagttacaggtaattatttcaaaataaccttatgtcgtttcgattacgtaaatatataacagatatcgacgaagcacgaagttgtcttctcaacatcaacgttgtctctggtacaccgggttttcggattttattactcatagtccgggaaatattcttttctaacggttgaggaaccgacctcatatcttttattcctcttaccgtactctacacaaacttttctatcttttttttctgtcgtttttctgggttctagtacgtcctataatgttcgttttctttttaaaacttaaaataataaaaatttcaaactacatactaatctttggtgacttcctatctttcgtttcctcacaatactaggttaaatacaaagtctttccaataatactgtaaaccgaaacccagtcttacatcttctatcactttctggtaataagggtgacattgttgatcttttttttgatctattgatgttgtgtttacctgtagtccctaaagacccaaggtgtatcctacatcttttgaccgtttccgtcggcccgcaccaccgagtacggacattagggtcgtaaaaccctccggttccacccacctagtggactccagtcctcaaactctagtcggactggttgtgccactttgagactgagatgatttttatgtttttaatcggtccacaccacagtacgttgacattagggtcgatgaaccctccgactccgtcctcttagtaaacttggaccctccgtctctaacgtcgctcggttctagcgtagtgacaggaggtcggacccgctgtctcgttatgaggtagagttttttgtttttgtttttgtttttgttttttggaccgtttgcgtcacaggaggtgtattgttattctttttatggctatttgattttttagtattgaactccggtccgtaccaccgagtgtggacattaggatcgtgaaacccaccggttccacccgtctagtggactccagatcctcaagttctggtcggaccggtcgtaccactttaggatagagatgatttttatgtttttaatcaacccacaccaccgtacacggacatcagggtcaatgagtcctccgactccatcctcttaacgaacttggaccctccgacgtcaacaccactcggttctagtacggtaacgtgaggtcggatccactgtctcactctgagacagagtttttttagttttgtttggaacttaaataacttctcgactcccacgtcccgttgattgatcggacttgagattcctttctacctgaaaaagttcttttctgtcttgtacttgtgaccgagtggacacagttacccttctattccggaggtatattcgttcatactccttaagctaattttcaatttgtagatttccggttcacacccgatcgtactcacgtatctcgggaacctttggtgtctgaggtccccttaagtatgagaatgtccgtgtacggtggtgtaagccgattaaaaacataaaaagtatttctaccccaaactggtacaaccggtccgaccagaacttgaggactggagttcactagacggacggagccagtgggtttcacgaccctaatatccttactcgggacacggaccgataaagtaaagaattattggtagatttctaaagatgggaagattctactcaggaaactgaggggaaaacggaaagagtaaaaaaaaccaattaataggaatacaaaataatcgtggacattctgagtactccttttcgacgttgtcgtataaactattccgaagaacttggtaacaaactaagacatcctcattaccgtgggtcctatgggtacatcttcccagggaaacttggcatcgtaaatggtaccagacccattacccgtataagtcacccgcttatagtaccatttcggtcaggttgtactgaacgtatacttcgtatagtcgacgaagtacatcccacgcggtgaaccgtaaaatatccctctcaacccgtcaggggaagagtcccatttgtctggaatatcaccgaaaataagtaagatggtctgaccgactatgaggagctcttctcgttggaatgctgtgtattagtagtctaagtggttccaactttacttctttttttacaattcccgtcggtctctctttccagtccaatgaatgttttccttcaggtagtctgattgtcacctagaaagacatgtatgggatgttcggtcttctctcgcccccggttataggttgtaagaatttcgtttattaaaagttgggtcttaaagtataggtcgattttgattcgaagtattcgcttcctctttattttaagagatgtctgttcgtttacgactccctaaaacagtggtggtccggacggaatgttctcgaggacttttttcgtgatttatacctttcctttttacccatggtcagtgacatttttgtatggttttatatttctggttgttgtgatacttctttgacgtagttgattacacgttttattgatcgaccgtagtactactgtcctagtttaagtgtatattgttataattggaatttacatttgtccgattcacggggttaattttctgtatctgattgtttaacctatttctcagttttcggtagtcacacgacataagtcctctgggtagagtacacgtttctgtgtgtatccgagttttatttccctacctccttataaatggttcttttatcttttgttttgttttgttttttgtttgtttttttcttttggtacccaacgttaggatcggagactattttgtcttaaatttagttgtttatagttttctctgtttcttcctgtatgtattaccatttccctagttaagttgctcttctcgattaatagggtttatatatacgtgggttatgtcctcgtgggtctaagtattttgttcaagaatgtctgggtgtttctctgaatctgagggtgtactattatcaccctctaaaattgtggggtgacagttataatttgtctagttactctgtcttttaattgttcctataagtcctgaacttgagtcgaaacctggttcgtcttgattatctggagatgtcttgagaggttgtttttagttgtcttatatacaagaagagtcgtggtgtaccgtgaataagatttcaactggtgtatcaaccttcattttgtgaggagtcgtttgcgttttcttgtctatagtattgtcagagagtctggtgtcacgttagtttaatcttgagtcctaagtctttgagcaagtttaggtgtgttgatgtacctttgacttgttggaagagaacttactgatgatccatttattacttcaattccttctttatttattcaagaaacttttactcttttttctctgttacatggacttagagaccctgtgtcgatttcgtcacaattctccttttaaatatcgtactttacgagtgtagtctttcgtcctttctaaattttagttatgagattgtagtgttaattttcttgatctcttcgttctcgtttgtttaagttttcgatcgtcttccgttctttattgattctagtctcatcttgacttcctctatccctgtattttttggaaagttttttaattacttaagtcctcgatcaaaaaacctttaaaattgttttatgtatctggtgatcattctgtttattcttttctctcttcttagtttatccgtgttattttttattatttcccctatagtggtgactagggtgtctttatggttgatggtagtctcttatgatatttgtggagatacgtttatttaatcttttagatcttctttatctatttaaggacctgtgtacgtgggagagttctgacttcgttcttctgtagtttagggacttatttgtttattgttcaagattttaactccgtcattaattatcggatggttggtttttatcgggtcctggtctacctaagcgtcggtttaagatggtctccatgtttctcctcgaccatggtaaggaagactttagtaaggtttgttgtctttttctccctgaggagggattgagtaaaatactctggtcgtagtgacactatggttttggaccgtctttgtgttacattttttttaaagtccggttatagggactacttgtaattacgtttttaggagttattttattaccctttggtttaggtcgtcgagtggtttttctaataggtggtgctagttcaaccacagtaggcaccctacgttctgaccaagttgtatgtgtttagttatttgcattaggtagtgtatttgtcttgtttactgtttttggtgtactaatagagttgtctatgtcttttccggaagctattttaagttgtgggaagtacgatttttgtgagttatttgatccataactaccttgtatggaatttatttattctcgataaatactgtctgagtgtcggttatagtatgacacacacgttttcgaccttcgtaagggaaactattgaccgtgttctgttccttctggagagagtggtgaggataaatggtattataaccttcaagaccggtcccgttagtccgttctctttctttatttcccatacgtttgtccttctctccttcagtttaacagagacgaacgtctactgtactaacacataaatcttttggggtagcagagtcgggttttagaagaattcgacgttcagagtcctatgttttagttacacgtttttagtgttcgtaaggatatgtcgttattatctgtttgtctctcggtttagtactcacttgagggtaagtgttgacgatgtttctcttattttatggatcttatgttgagtgttccctgcacttcctggagaagttcctcttgatgtttggtgatgacttcttttattctctcctgtgtttgtttacctttttgtaaggtacgagtacttatccttcttagttatagcacttttaccgatatcacgggttttattaaatatctaagttacgataagaatatttcgatggtaactgaaagaagtgtcttaatcttttttgatgaaattttaaagtataccttggttttccttcctcgttaactttataaccaaaagatttaaccccctctttatctatacttcccgaacgaatataggaagtgttcacacacgagtgtcatgtattcatcctgatctaaaaaaaaaaaaaaactctccctcagagcgagacagtgactccgacctcacgtcaccacgatagagtcgagtgacgttcgaggtggagggcccaagtacggtaagaggacggagtcggagggctcatcgaccctgatgtccacgggcggtggtgcggaccgattaaaaaaaaaaaaacataaaaatcatctctgctccaaagtggcacaatcggtcctaccagagttagaggactggagcactaggtgggcggagccggagggtttcacgaccctaatgtccgcactcggttgcgcggaccggatctaaaaaaaaaattagacagaaagaccaactagacccctcctacgaccattttgacgttaagaatggtttcctcctcatatgaccatattgatgatattaaaaacaagaagaggtttaacggagtttaaaaaaagagagggaatggactacaccaccaggatcctggtcccgaggttaatattgaggatgattatcgtccttacgaaaaattcgttttttgaaatggaaatttggagatacaatcttaaggattttccgaagatccccacctaacacgaaggtgtaaaccgttttacctccgattatcacttacatatatcgatataacggaccaccatttttatcgggtgatcaagacatggatacattggaatggaataaccttaccctcatctgactcctcctccgtgaacgatctgatcataacgacggacgttaggtcgtgtcaccacaaagattgtagggaaggttttcactcaaactcatttatttacccaatttttaactctctttaatttgtaatgtatttatgaagttttctctgtcgttctctactgtgacggagaatcgggtcaataaggtctacggactttcacacttcaatatacaaacgactctgttgttgacgaaaaccttggactgttctaattttccttcggacatttggactcaccggagtgggaccctgtgtaattacgttctactacctaacctggttaataattactgacttaccctaagttatagaaaactcaacgtacgggaaaactacatttcctaggtccaagtttatggtccccacctgacactataaaattttatatataaaccagaagtagggtcaaaggaccgtatattgaggattttgggaaccttagcggtttcacgacagaaaaatataccattacaactgactgtggaagtcccatcccgaccagtggtctttctgtttccgtactaatctcccaacccgaaagttggggtagggggtttgagacctctcccttctctccgacttccagttcaactaatggttaccggttaccaaattagttggtacggagacattacttcggatacatttttgggttctcctgtaccaagtttctcgaagacctatcgacttgtatacctccaaggacctctcaccgtgtgggtccctcccgtaccttcgagatatggagaaagggatatggagtaggatgtgtagagaagtagatataggaaacatcataggaaatattatttggtcgtttatatttttgttaattttttacttttttcagttacacggattctggtaggtctattattcactgttttatatcaaagtttaggttcagactgtggattgggttacgacacactttgaatgtattggagaatgttggtagttagaggtcctaggagacgacgagtatagttttcgtcttcgaaagtcaataaagttattctaacacaaacacttcaggacttccctcctcggaagtacaaatcgttgtgggtccccctaccagtccgatattctaacattatacactgaaattattgttccaacttattgaaaaataagttatagaaaaaaaaaaaaactctgtcttagagtgacacagtgggtccgacctcacgtcaccgtgctagaaccgagtgacgttggagacgaagtgtccaagttcgctaagaattcggagtcggaggactcatcgaccctaatgtccgtgggtggtggtgtggaccgattaaaaacataaaaaccatctttaccccaaagtagtacaaccggtccgaccagaacttgaggactggacttcactaggtggacggaaccggagggttttacgacccaaatgtccacacccggtggtacggaccgaaaataagttatagaattttatataaatcttttaatataacatgaagacgtgagacgatttcaagactggtttcggtctctttatgctataatttttactgtttactcaaataacttcttcttagtgtttcaatcttaaaatgcttacagtataacacctgagtctgactcgaatacaaacggtgtttaaaatatcaatatttgaggagttcccgatctcattcctcacaagtcaaagagtttgaggtgagatgaatcatgaagaatcacacccctatatatactttctccttcctctccgactttagtctaagaaaaagacactcactaaacccgaaacttatggagtctttttgaagattggacgtcaccgatcagttgacaagggaccgattgtgagttctcatatctcgaagtacctctaaccgtctcgaactgggaagtactgaacctacactggagactatttatagacctcaattttcggaatatttccttaacacaaaaatatatcatgacctgtgactatctactctgtctcactcaaacgaggacactcagattaaacgtctaccctatttcccataaacacctttactctatttcgtacatagtagaaactaacaaattgacaatccgacgaaaactaaaaaggtatctagatattacttgtggaaacgtaagatcggaaaagaaaggaatcttgaaactaataatacagttcaccatatttacaaaagtaccaagaaatctacgtaacggtttagtaaagaatttacctctctttattaaatgtacaaattacggagagtcatgaccaaatttaaaacttttatttacgaattaccttattttttacatatcaacatccacgatgaaacatttactcttagtccgacgtctttatagaaaaagtactttacgtctcactttcaccgaaggaacaagataagaggtactaattgactctttagatcctccccgatgtgttttaccacctttgacctttcattttctcaaccacccccccccagtctccttctcactctcgttacaagaattggaattataaattttcgatagatgttgtctctacaggatattttccatgagttgataataaaaaaagagagaacgggaatggcgaaatatcggatcttgtacttccgaacggttcagtgtctccaattcaatgtctctctttccctacccttggtgaaaccgaagaaaccaggggtttatagacaagggtagttagataataaaaactctttctatgtactactcctgatttaagactaaaaaagtagaacaggtttaaggatagattccccagacccttcagtacgggatgtttagtatttaacagtagcctacccaaaataaattggaatatatatagcactgaatgaaaggttagactgagaccgtattgtaatgttctgttccttcttttaattttataaaatgaggttttgtacgaagaaacggtatagaactttaccggaacgtttcgacaagaaacacccctttttaaacgtagacatttcttagagataattgtatcgatctagaataagaaggtccggaagggttaggatttctctaattgattttcagatcgtggaaaatttctagacttatcctttgtaaacagtagataacagagattcccgtcggtgataatctgaagttttcttggaaccagaggtgttagaaaatagaattggacttgtaaaggaaagatattagggtccaggaatctatttgagttggttaacagttggtcttttacaaatttaaatagatatcggaccttaggggtggtaccgaaacttaacagggtggaaagacctggtttggttacataaagaatttacataaactaactacagagtacggaagaattttacatattttattcaacatggggttggtggaacccgtgtacaagagtcctggaggactcccgacacagtacccggtaccagtgagtataaaccgagtcttatttagagaagtttataaaatgtctcaaactgagaaaaacagctgttaccgatacgtgctaacggtgagtccatgactaaagacataattacaccgtacgatcccgaaccatctattttcaagtcctcagatctttcaaatctctttcctctgtataagaagagatcttgaactacttcctcctcctcccttgtccttccttatggtaattcgagattcttagtagttggttggtcgtcttttataaagactcatggaaaattactttatattctcaaaagataaaggggtttaaggtttcttgtttgggtgatatagagacttcgaatgtcattagaattgggaagacaaagacctctcgtatagtgtttacccgtatagtggatccagaagtttgtgggttcccctgtcaatccgatatttctattttgtatactgaaatcattattatgtttattctttgtcctatgaaatacgtctacaaggtttcgaaaccggacaaacactcaaatctaagtactcgtatatggatcctgtgtttacatataggtaacattaactaactcttattcgactgtaattgttaaatttctctgtgacgttcatcatattagtacatgtatgtatatattttataccgataaatacgacctttcctactccggttaactcctaagactataatcgaaatatttctctacacagggttaatcttctccacctctctcaacactttaaatcttaagactaaaattactatttcctttgtacacactatcttttctggtccttaacccccctttttgaaagtcactttgatgacaaaaacaacaacaacaaaaaaattgacatttgttcggtggtttgaaggatttgttttcacttgaaactcactttaatattgtaaatcggtacgtcttttgtcccgtaaaaaggtaaagatttccttattatgatttttgaatctaccgaggggttatgaaccgtttgtcactaccaattataattcacagttgaactaacctaacttcctacgtgtataacgaggacccacacagacactcacacaacggtttcctctgattgtagactcagtcacctgaccctccccgtctgggtgggagttaaacccacccgtggtatgttatttgacggtcggaccgatcttatttcgtccgtcttcttccaccttcttcggttgaacgagtcagaagaccggaagtagaaagaagggacgacctacgaaggacggaacttgtaatctgaggttcaagaagtcgaaaacttgagaacctaaatgtggtctccaaacggttcccgagagtccgaaaaccggtgtctgacttccggcgtaaacaacctaagggatgaaaactccaaaactctgaacctgaccgaaggaacgaggagtcgaacgtctgtcggataacaccctgaagtggaatggtagtacgttcagctatgaggagttattcgaggggaagtatatatgtagataagataatcaagacagggagacctcttgggattatgtgtttgattgtcatccaacaactcatcttacattttgaagactgaaaatgtcttataacaaaagtgaatcttcgacgaaatagtctttattttatcgagagagtgggatatttgagactttaaaagttgttttttacgtgtcttactgttctcgtcgttattattttaggatttgttctgttgtgagtttttatagagacacttttctaaccttattttattttatagttttgtttttttggggtgtttcgtcggtgtcttatagtgttggtcagatatcactactgtcaatagtgatactgtcaatagtaacggaaggatacaaagaaaggtagactatggttcccattgtaaagttcgtgtccattgtttgtccattgagtttaaggaaaacatgacaaaaggaagaaaaacctacaggggaccgaaagaattcatttaaattccagtgtgcgtacttgtgtctctttgtaaagaaatacgacgtttaccactggaagtgtaatagtcacagtgataatgacaccgaccagagtggaagagggtgatacccgtggataccttactaatttctgtgatctctttcagttttacctttatccctgatctaccttgaaggccgtcagtttcttcttcctaaatacacaatcacaattgtgatattcactatcacaattcctcccgttcagttcaaccttgtttcgaatcatttggtcgagatgggatattggaccagtaacgggaaaggggtgtagttcttcatgaaattattggaaaccttttacctggaactcatgttgcaagaatactatgatccaatacgttaaattatcgtggtctattggacccctctaagttgtcaaccaagatcttatgaaatcaacagagtcaacgaatgatattagaagttaaaagaagacaataacaactgtaaataaagtaaagaaatttttagaatattttctaatgtagtaacttcagagtagtacgggttgagaggtcacgataatgggagtcgaagttccatccatataacttcgataaactcttctaataatgtatcgactagggattataaatgtaaaagacataaacttttaagtgaaggaaagattttaaatcaacattaggggtttaattatgaatgtagtgaaaaagtcaataaacatttgtacgagtctcaccatttttaacactcagtagacttcacgtgtaaaggtcgactccaacttgtttcactatgagacagaaaaacaaagtagagagtatgatatttgtttatagaaaacataacagataaaggatagtacagaaagtgtaaaaacaaagaaaacaaccaccaaaatgataaaatttaacgaccgttcgtatcacgacttcacaacagatccccaggattcccgttcttaccctatccggcactcctattttatgtgcacaatctattcgaaccaagtccgtacttaatatcaccaaaacggggattagagtttcaattactttgttgttatataagtttattgcaccgaaatttgcctttgtgtgtattttgttccaatatataactgaccaactttttgcaaaacactggtctccgagtgttcttgaattgggacatgaaggagatcttctttaccaagtcataaacgatttagttacaaacgtcaccgaaatatctcgtattgatggtacttacgactctcaactgatataaacatattgtgtgctcttactttacaaagttggtttattgtcatttgaaatacggtcagaggggggttttagaatcttatcgaataaattttccaaccggcagtcgtgaattttcactttctcgatgaatgatccggggttgcacgtcatttttaatttttttattaggtaattgtagtctgattgacgtaaaagacaaaactgtacaaatgttcgatctgtctagtggttacacccaatatagtgtaaaattagagttccttcataaactgtaccagaaattaatataggaacatctgttgtgtctctatatacctaacctattattatgttaattcactcgtacattgataaatctcaagagatacaattcacaagactaattctttaataatgttttcacatttctcacaagactactacaaggtatcatgacaggactccgaaataagaagtttcgggacaggaaaggtcttaaaattgaccactgaaagtatctcttcatcattcgtacgaaatgtctcaaaccatacaattcttcgatacactcttgttctgccgtcttattgtccataggggggaatataggaaggtgttgttgttattaaacccttgataggtgtttgttttcacggaaacaccttcgaaaccctaggtccatccttcaacgttttagaaccacctcgtgttccggttcctcctggtaacactcttccgtccggacacgggtccaccttccgaacggatggtgtcaggaccgatgtctggatctttgtaacaacgggggacacctgagtcgatgtcaggacaaatcagaacctagacggtgggttaggtatacggttctttgggttctcctcagtacggatgtggtacaaaatccattatccggacgattggaaccaggacctatacctgggactttcctaggtactggacggaggtaggggagagtctacactaacccgttgtcaagacgggcgtgtacttatacgacactatgtacgggtaggtgtgggaatcttcgtccagacgatttaagtcagggtatcgtctaagactttgtcaggacattgagtcaaggtcgagaaggattgacaccagactcgtataaagacggaaaggtccataggtggtcatctgtgtaggtaaacacgatgacctccgtccaaacggttcgagtcagactgacacctagtactccgtcgtgacattgagtcaagatggggaagggttagtaccaggtcctcatcaggaagggtgagtccctaaacaacccattgtacgggtaggtacaggacccaccatccggatgattaaaacaagactgacgtctaagacttcgtcgggactctgtttctaggtccaagtgagtctattttaatcctcatcaggacggaagggtgggtcctcctacgtatggacaggtacggggacctcagtccaaacgtctggagtaagagtcgacacctgggacttcatcgggatactgaaccaaagtcgaggagagtcggtactatacaccggacaggaaggacgggtccctggaccggtcatttaactattctcgggagggttactaagtcacctttggtgtgagtaaatatggtggaccattgttcaggtgacagatttctgtgacttcacctgtgaaattggtctcgatcgagataactacttccaggacttccatcaagtcaggtatcctcgatctgtcttagatgtaatcagactctgagacaattgtctgtgtggttgacgtctggacgacccgtgggtcgttgtcggtacactgagtcgaggttctgacaaagtgacgttagatctaccgttaaggtattcgaacccctaggttgtccttttccagaaatggacggtttcggtcagtcatttctgactttctctacaaacacgtaagtttacatatctgtagttatactccgatgtacctaaaatttttttagtccgtgtgtactgtggtggtgtcctctgattatttcgaggtcattagttggggttcctttacatctatatactttatggaccgtttcctaagttttagcagtaaatttcttcgagttactctacattctactgtctatttgttgatgtgttttggtccttttgttacgtacttttttctcttcaaattatttctttatctttggaattttttcttgatttttcttcaggacttcgacttcttatgttcctttcttccttttttaagttatctctcgaagctgtcttctgcgtttgtcttatttcgaagttgtcgtctgagttcgtcagtcaagtttctgctcagtaaactttattcggtcaatcggtccacacctccgaatatggacaacagagtcgtaaaactttccgactccgtccatctagtggactccagtcatcaagttctttaatcagtcaatttccttgttttttattttttttcttattttttctcacttacagggatactctggattccctgtggtagttcacttatttttatacgtaatagtctaagattcttccaccccctcctccctccctctctctctttatcgttctttcgaatacgtttgtttatttccatcttttaagagtttagaatcctttctatatttataggtctgagtacttcgaatttctgaaagttcgttttatttgggtttcttctaatatatatctgtgtaatattagtttaacagttttcagtttctttttctgtattaaaactttcgtcgttcttttttgtctgattagagtacgttcccttagaagtattccaatagacacttaagaatcgtcttttgaacgtccggctctctcaccttattatataaattcagtactttttttttggacggttagttctgtgatactgtccttttcgacaggaagtctttacttttcttgtttatataaagaaaaaaataataataatatgaaattcaagatcccatgtacacgtgttgtacgtccaaacaatgtctccatatgtacacggtacaaccaaacgacgtgggtagttgcacagtaaatgtaatccataaagaggattacgatcgggagggggtcggagggtgggtgattgtccgagaccatacactaccaggggtgggacacaggtacacaagagcaacaagttgagggtggatactcactcttgtacaccacaaaccaaaagagaggaacactgtcaaacgaatcttactaccaaaggtcgaagtaagtacagggacgtttactgtacttgagtaggaaaaatatcgacgaatcataaggtaccacatatacacggtccaaaagaattaggtcagatagtaactacctgtaaacccaaccaaggttgacaaacgataacacttatcacgaccttatttatatgtacacgtacactggaatctcatcgtactaaatattaggaaacccatatatgggtcattaccctaacgacccagtttaccataaagatcaagatctaggaattccttagtggtgtgacagaaggtgttatcaacttgattaaatgtgagggtggttgtcacattttcgtaaggataaagaggcgtaggagaggtcgtagacaacaaaggaccgaaaaattactagtggtaagattgaccgcactctaccatagaataacaccaaaactaaacgtaaagagactactggtccctgctactcgaaaaaagtacagacaaccgacgtatttacagaagaaaactcttcacagacaagtataggaaacggatgaaaaactaccccaaaaaaaaagaacatttaaacaaattcaagaaacatctaagaccaataatcagaaaacagtctacccatctaacgtttctaaaagagggtaagacatccaacagacaagtgagactaccatcaaagaaaacgacacgtcttcgagaaatcaaattaatctagggtaaacagttaaaactgaaaataacggaaacgaaaaccacaaaatgagtacttcagaaacgggtacggatacaggacttaccataacggatccaaaagaagatcccaaaaataccacaatccagattgtaaattcagaaattaggtagaactcaattaaaaacgtataccacattcctaccctagatgaaagtcgaaagatgtataccgatcggtcaaaagggtcgtggtaaataatttatcccttaggaaaggggtaaagagcaaaaacagtcaaagtagtttctagtctaccaacatctacacaccacaataaagactccggagacaagacaaggtaacaagatatatagacaaaaccatggtaatggtacgacaaaaccaatgacatcagaatatcatatcaaacttcagtccatcgtactacggaggtcaaaacaagaaaaacgaatcctaacagaaccattacacctgagaaaaaaccaaggtatacttgaaatttcatcaaaaaaggttaagacacttctttcagtaaccatcgaactaccattaccgtaacttagatatttaatggaacccgtcataccggtaaaagtgctataactaagaaggatacgtactcgtgccttataagaaggtaaacaaacacaggagaaaataaaactactcgtcacaaaatatcaagaggaacttctccaggaagtgtagggaactttcaacctaaggatccataaaataagagaaacatcgttaacactttccctcaagtgagtactaaatcgagagacagacaatcaccacttaaaccgagagacagataattaacacatattcttacgaacactaaaaacgtgtaactaaaacataagactctgagacgacttcaacgaatagtcgaattcctctaaaacccgatctactaccccaaaagatttatatattattacagtagacgtttgtctctgttaaactgtagaagagaaggattaagttatgggaaataaagaaagagaacggactaacgggatcggtcttgaaagttgtgacacaacttatcctcaccactctctcccgtaggaccagaacacgacccaaagtctcccttacgaaggtcaaaaacgggtaagtcataccataacggacacccaaacagtatttatcgagaataataaaactctatacaaggtagttttggatcaaataactcaaaaatcgtacttcccggcaacttaaaacagtttcgggaatagacgtagataactctatttgcacctaaaacagtaaccaagacaaatacactacctaatacaaataactaaacgtatacaacttggtcggaacgtagggtccctacttcggtagaactaacacctcctattcgaaaaactacacgacgacctaagccaaacggtcataaaataactcctaaagacgtaactacaagtagtacctataaccggattttaagagacaaaaacaaaacagtcacggtccgaaacgataatcctactacgaccggagtattttactcaatccctcctaagggagaaaaagataaatagccttatcaaagccttccttaccatcgtcgaggagaaaaatggagaccatcttaaaccgacacttagacagaccaggacctgaaaaaacaaccatccgataattaataacggagtcaaaatcttggacaataaccagataagtctataagttgaagaaagaacaaatcagaaccctccaacatacaccggtccttaaataggtaaagaagatccaaaagatcaaataaacgtatctccacaaatgtcataagagactaccatcaaacataaagacaccctagtcaccactataggggaaatagtaaagaataacacagataaactaagaagagaaaacttccaaaaaaaaaaattagaggaaaccaagacgagacaagaatcaataaatagcggaagacgatcgaaacttaaacaaacgagaacgaagagaacaaggaaattaacactacaatcccacaactaaaatctagaaaggacgaaagagaacacccgtaaatcacgacatttaaagggagatgtgtgacgaaatttacacagagtctctaagaccatgcaacacagaaacaagagtaaccaaagtttcttgtataaataaagacagaagtaaagtaatacatggatcgtaagtaagtcctcgtccaacaagtcaaagatacatcaacacaccaaaactcactcaaaaaattaggactcaagattaaactaacgtgacaccagactctctgacaaacaccactaaagaaaagaaaatgtaaacgactcctcacgaaatgaaggttaatacaccagttaaaatcttattcacgctacaccacgattcttcttacgtataagacaactcaaaaccacctctcaaaacatctacagataatccagacggaccacgtctcgacccaagtccaaaacctataggaaaaattggaagacagagtaactagacagattataactgtcaccccacaatttcagagggtaataataacacaccctcagattcagagaaacatccagagattcctgaacgaaatacttagacccacgaggacataacccacgtatatataaatcctatcaatcgagagtaacaactgaactagggaaatggtaatacattaccggaagaaacagagaaaagtagaaacaaccaaattataaggcaaaagtagtctctgatcctaacgttggggatgaaaaacaacgaagggtaaacgaaccatctagaaggaggtagggaaataaaactcggatacacgtagagacgtgcactctacccagaggacttatgtcgtgtgactacccagaactgaaaaataggttcaactgtcagagacataaaattaaccccgtaaatcgggtaaatgtaaattccaattataacaatacaaacttaaactagaacggtaatactacaatcgaccaataaaacgggtaattaactacgtcaaagaagtatcatagttaccagaaatgttaaaccgtacaaaaacgtgaccgaccatggccaaaaaggaaaggtacaaatcacgaaggaagtcctcgagaacattccgtgcagaccaccactgttttagacagtcgtaaacgaacagacatttcctaaaataaagaggaagggaattcttccaatcacaccgacctatactttaagaaccaacttttaagaaaagaaattcctacaacttataaccgggggtgagagaagaccgaacatcccaaagacatctatataggtgacaatcagactacccaaaggaaaacacccattgggctgaaaagagagaccgaaacgaattgtaaaaaaggaagtaaagttggaaccacttagactgttaatacacagaacccaaacgagaagagctcctcatcgaaacaccacaagacacaaaaaggacttaaacttacaaccggacggaacgatacaaccccttcaagaagaccgaatattaggacttatcacaaaaggttgaaccaaggtaagaggggcagtgaaagtccatgtggttagtttgtatccaaaccagaaaagtgtatcagggtataaagaacctccgaaacagacaaagaaaaatgagaaaaaagagatttgaacagaagaacgaaataaagtaattaaactagaagttagtgactatggtaaagaagatgaactaacttagccgataacttcgaacacgtaggtagtgcttcaagaacacggtaccaaaagtcgaggtagtccagtaaattccagaagagatgtgacaaataagatcaaccggtaagcagattggaaaaagagttccaaaaaacgaaggaaggttacccgatcttgtaagaggaaatccagtcttttcaaacaataatgactggaagacttccgatgaaaacagttgagcagtttcagtaagaggtatgtcgaaacaaggtaacgaccgctcctcaacgctaggaaacctcctcttttccgtgagaacaaaaatcttaaaagtcgaaaagacgagaccaaagagtggcagaaacaccaaaatagatggaaaccagaaaaaaaaatacgttctcgttaaatttttttaatttataaataaacttattgttcaaattcaagctcgacgttacaaccgttacgtccaaaaattgtgtctagtgtttttcgtacgtgttttttcatgaccgcgtttcctgttttatcacgattcttaatccggtttatcgatgactaaaattcttttattttccggactttagtgatatgttttatattttacataatttgtgatggtaggtgtcttgtcagaaataataagtaatataaatttttaataaacgtattaatatataacttaacatttactcataatatgtacttggaggtaaaccttccgttaaggaacatcgtgatatcttgtagattaatgtaacgtttttcataggaaaaaacgatagctattttgtcaattagcataatgacatttatagtccttccgatgtttttttctatattctaaaaaaacagaagttttacaaaaggtacgtcacttcgtgaacgacacaacttgacttacgtgatgacctcttacaagacctaggctctacgagaactctctgttctgatccgaaaagtttagtttgtgagtttccttagtacgttgggagaatactgaccctatggtagtacacggtgaatggttacgacagagaggtcttttggtaagttctacgaattatttttttagtctgaatgaactatttatatgtattttacttctgtggttgacgctaaactgtactgatgaccattacagacacgatacactttcgtggaaatttttctcggatacgccgttctctattcacagatttctaagttttacttagttgtcgtaacctattgttatattaagagttaagtcttcgacggagttctaatccacgtagaagtcaattacattgtcctttttttccgtcacctaaaataaaataattaacataggtgaatgtttgactggattccagtggggctacacatctgtgttactctaaaaacaacaaatatcagaaatcaacttcactattccctttatctagataaatttttgttttggtttgtcgataaagacagatctaattctacaccggggcccacactctaagtgtaaaactcaccggtgaacaccacgttggaactactagaccccaaacagatactaagaccgacacaccaacgggaagagatgttagggttattaggtacgaaccaccggaagtgatataaaccccctgaaatagagacgtgtcttggctcgacgaacgactgtaccatttgtctagtcttccggcggactccagaggcccgtccagggtacgtactccgacttgtacaaaggcgtccggaacgagtggcgtcggtagaaccggtcgtggtcctccaacacttaatgtttgctgtggagcaaggagacgacgaaccgatccaagacgtgcaccgggttttagggcttcgggcactacagtcaccggtacacccgtaacttgcacacgtactcaggacgtcgacaggacaactcggagtggtacaagtagtagcggaggaccaaccggtcgagatgtagaagccactggtgatcgaattagaataaggtaaagattccttataggtcggtgaccacgtgtcggtgacggtggacacaggggtccccaaaacagttgtggtcgtgcaggggaccgtgacgtaacagaccgtactatttaagtaacccgaccttctgtcaccatcactgaggagggtcctgttaggtccctaaatcatgacaaaccgactggtaatgtctgtaaggacgaaggagtcgacgtagaaattttgaaacctattagtctccgtagtgaaatagggaaagggacagccagtaaaataatgactgaggttcctcgtagtcgtataacagtgtaagacactgggggtaacgtatctccagtgactcctgtaaccgtgtacgataggacgggtagtacattcccagcagatgctagcccatttacattagacaccaaacttggttcctttcgggtggtacggagtttccttaccgtgttcataggtaaggttacgcttcggaaccgtattgccgagggtctttgacgagtagaagaaccttcaccaagaggacatttctaaggtcgttaaaaacgttctgtagaaccccgtgaaacgttggacacgggaagtcaagtcacttagaccaatcggtcttcgaaaacaggttaagtattgaaaggtccaatttcctgagggcgaatctgtaccaagaacccggggcgagaggagtgtcgagtcggggaggggagggagacacccaaccgacccaagaaatacctaggtggccgaccgaaacgtgggaggcggaggagggtttttgcccgacgcccggcgagggtgttacgtggcccgtgccggcctgagggaattcgcagcggacttatttttacggtgcggaccaccgtcatcgtcaccgtcgggtccgggtacggacccacgacgcccccgagtggaccgaaccgtatcgggacaccctcggtccggtaccgtgagtacggacgacccgtacaccccgatgcaaaccagaaactacaaccaatagatgtctaccccaaaaatacacctacaggaaaaacaactataactacaataaagaaagacaaacgatcaaaaggaagattgtcagtccagggagtcgacgtccagacaacctcaaaagacctccaggtaggtcgggcaaacggacccatagtggtcgtctccgacgtcttgtcatctataacgtcttgtggtgtataacgagggactaaaaaggagaccttcgaagcagggtctcccttcggcggatatactacacagataaccggggatgaccctccacagagggtcaatccgatgtggcgtcagtccctgggtgtactcctccgtcagacagacaagagtctcgagtttacggtatgaccctcttggtgacgagagaagtcaagacagtctgtccctacaaattcaaacgtcttcaacagacgacggaaaacaaatcgatgcgggacgggtgtctccacctaagatatttccgtcatccggaacgactcgacaccacccgaggtgggtcaaactcgaagggcctgtgaaacaaatggatcatttcggagtcgttaccgtccacggggagggggtcgttccgacgtcggaacgtccagctagagtttgacgacgtgatcgtcactcgttccgaggtacacacaccctgagtggctcggtccgtgccctctcttagaggatctgacggccaacgattctgacaccctttttacgtcataaacccaccctcacagggcaaaaaggtccatgtcagacagtgccgaagggaaccgatcctttccctttaagggactggggaacgtgaagggtcaattccactacggggtgggacgaagccgagtgggaggtacccgacgtgagtgacaggttagtccgggtcactctacttggtcaatggagtcgacctttacgtctttagtgggttgaagacgtagttactgtgaccctcgacgtctgacctcgacaaggataagccggtagaagtcggtagccagtttaaacagtaaaatattcatagggtaagggtgttgttacttgtgtgaaggtactattgtcgtaattagtaaatactccaaccacagggtactgggtttttgatgggtagtccgggagttaggaaataacatctcaaaaatatacaccaaattcaatccaacgaaagtcgaattttatctgacaatattggaattctacaaaatatattcggactaccattgttgtttttcttttcgagatcatctatgtattttctatttctctttctttatttttgtatggtgatgttttttttagtaatttcatacttccttctgtcgttctctccttatttcattgtttctttgatgtttgtattttgttacgattttaactgttatttcggtcgttgccactgtgtacagacaccagggtcgatgactcctcctactccacactcctaacgaactccaattatcacaccccgacatcacacgatactaacacggataattatcgacgacgttaagtcggacctgttgtatcgttctgtcacaagaggtttttatttatttatttttaaattttacggttatcaaaaaatttaatgagagggtgaacgtttctgttttgttacacatctctaaatgtgatacttgtaaaaaaaaagggttcttcgttgtgtctttgaattttccttttcactttctttggtgtatgggaaactttcttcacaacccgacgtcggatgtgacactcggtccgtcttttgattcagggtcttacactctccccctatttgacggaggtcctatgtgtgagggtgacccttgggtcgttaagtccggtgtcccctacttgaattgagatggtcgtgaccttgaataaatcactgaccacccctcatataatattcatcgtctttgtcctgcacggaacgtacgtaaaggtaagaggtcgtctctacctcccttcggtaaggactaggatggagtgtgtcctggagtgtcttcagacggtcgattgagttcatcacaagtgtccaactctcttcgagggttgactcgaagtactatattaggtcttggctcccccgttcatccttcatttgacatctgtacccaagtcctcgaccaacagggacgaaacacccgtctgaccctttctatatcggggtatcgatgtcaaatacagagggaccccttccgaataccggatcccgtcaaaactcaaaacttccgtctgacagatcttagatcgatcgacgacgatcgccttattacaaccacactccggacgaaacgattcacgtaccctcgatccaccccgaatcgaatgacgacggacgattagagataaggggtatacctaagaaggcacgtcgtctctgtcgacatcagaagggaccttgtaattggaccaccggtcttttgataggaggtttggtgatcccggtgacgaccgtgagtgtacacctctcggtctcacaaactgaacagactgggtcgggggtgtatcgaaacggggaggtggatgggaccatagaattgtgtttcctttcttttaaaactcttcagataccgggacgagtaacggactctatggtctcatggaggggacccattattttccgttcatgtttagggtgacgatggtgtcgtcgaccacgagaaaacgttcacggtggaggaccgacctccggttggttgtatcaggtaatgtcgtggacgtccgtcttattgtgtcgtggatcgttcctcttttgaacccgtacaagattcgatagtagtaacggacgtagtgagaccgattcatcctccaggactcagacaggtacactggtcaaataatgataatatcgaacgtcaactctttcggttgtgagattcagataaatattggttccttagagtgtctcagatatagtgaggggacggtgggggtagtctcgactacgaccatgggcgacgaccctctgaaacatactaccgaccctctccagtatagtgatctagggaacatctgtaagaggtcgtggtcgtaccgtataccttaggggtgacttgtcgatctgagtctcctcgtcgtcgtaagtgacattagactgggagtccctgaggacgaggaccttctttcgcccctcacttggggtagttctctcgtgggacaaactgttttattaggtcttccgttcggaactcagggacttgaaagacgaacacccttcaaagatagtcgtctccgtgttcacgtcctgactcgagtcacacctttcaatacaccgagatggtgctatcagaccgtcgggaccatgaacacttcccagaacctcttcccctgaaagagaaggggaatgaatcgtgacgtctgtgtcgacgtcgaagagggtacccttgaatcgtacccacttgtacatttgtcggaaggacttcgtgaagtcccactatcgtagggggtttttcctcacggaacgtccaagtccgaacgtgatcatctcggtggtagggagagatgtaatttgtattcgtaaggacgtctaattttctccatggacagactagacttatcgtccttgtgacacagtcctcacactgaccctccgtctaacaaaagaacgaccggaccgtcccctcgttctaccgaaagaaggaagagggtactttcctggaaccacacaaagtgactctcgagggggtcggtggagacagttccaacccaacagacgggtgatgacccataacacaaatggatggacgaaatcggtgtcggtcaaaagtggacatctgtggtaggggatgacgggacttctgacttgataagttggatcatttattttatgactctttttttatttagttattttttcatgtgtggtgacccctatttcttcaaagtttactggagacgataaagttgggatgtcctctgtcatttggacgagtgtgtaactcttataacgatgatgttggtcgtagactcattcgttactgcatttctgagagatattggttccttgagtatggtttagaaatggaggttgtgagtctcggtttaatccaatgttatttgatattagtcggtccacaccaccgagtgtggacattaggatcgtgaaaccctccgactccacccacctagtgttctagtcctctagttctggtaggaccgattgtaccactttggggtagagatgatttttatgtttttttaatcgacccgcaccactgctcgcggacatcagggtcgatgagtcctccgattccttcctcttaccgtacttgggtcctccatctcgaacgtcactcgactctatcgtggtgacgtgaggtcggacccactgtctcgctctgaggtagagtttatttatttatttatttattatttgatattagtaatttcagtgtgggagtttcccatttttcctttatttttggtgtcatcttaatttttcattaatcttctttatcagatggatttactctaccttagtctttttattaagacctttatactgttttgtccaagatatcgaggggggtttctagtacgatcgagaggtcgttacctaggtttggttctgtttttagagactttatggtctatttcttaagttttccaaccaaaaattcaatgagttcctctgtgttctctttccaccttcatttggatttctttcaattttttcaagttttatgtttattttaaaaaattttctttatctatataaaaaaattttttagtcttgaaaacctttaccttatatgtaaaacttttgatgttttacgtcacctaaattgttatctgatgtggttcatcttctttattaaagtctcgaacttctgttccgaaaacttaattgagttagtctgtttttaattcttccttcttataccccccaccccggttctactggttgatcttcgtcaccactggcctccgacagtaccttttctaggttttgccaaacgtttagaacgtggtcgttgactccataggtccaagacagtaatcctgactgttccatcgaccgtactgggtacctttccttccttctcgacgtgtctaacaggttgtcggtgaccccatcttagtcagattcggactacccaaggaccaccctccccgtcggtagtggtgacgacaccgacggacgacagattcggtagactcgaggaacttcctccccgtcgtcggttgtgtcgtcgacgtcccggagggacatctttgaggttgaggtcggtccccgagtccctctcttaagaatagagggacccggactcggggagccccctttacattagtgtcagagacggttggtcgtctgagtcagaaaggaggacgatggacactccttagacccgtcgtgtctgctcacccaaagggacggtgcgtcgtgtgggggaggtaattccctttcggtttacccaggacgaagggtaaggtgggttgacccattctggggggaaacgtccctgtacctacttcgaccttcggtagtagtaattgtttgattgtgtccttgtttttttgtttgtgacgtacaagagtgagtattcaccctcaacttgttactcttacgtttctgtgtccctccttttgctgtgtgtggccccggtcagtcccccaccccccacttcccttgttctcgtaattctgtttatcgattacgtacgtcccgagttttggatccactgcccaactatctacgtcgtttagtggtaccgtgtgtacatggatacattgtttggatgtgcaagacgtgaacataggaatttgaatttcattttttttttttttgttttttgggtattaggtagtgtatttgtcttgattactgtttttggtgtactgttaaagtcatctacgtcttttccggaaactattttaaggtgtagggaagtacaatttacgggagagagtggtgaggataagttgtatcataaccttcaagaccggtccccttaatccgttctctttctttatttcccataggtttatcctctatccttcagtttaacagagacaaacgtctattgtattaagatataaatcttttggggtagtaacgtcgggtttttgaaattcgactattcgttgaagtcgtttcagagtcctatattttagttacacgtttttagtgttcgtaaagatatttggttgtaatctgttcgtctcttagtttagtacttacttgagaataagtgttaacgatgtttctcttattttatggatctttatgtcgattgttccctacactttctggagaagttcctcttgatactttggtgacgagttcctttattctcttctttttttgtttaccttttcgtaaggtaagagtacctatcttttttaactatagtatttttaccggtatgacggatttcattaaatgtctaagttacaataaaagtagtttgatggtaactgtaagaagtgtcttaatcttttttgatgaaatttaaagtataccttggttttttctcggacgtatcggtgctgttaggattcgtctttcttgtttcgacctccgtagtacgatggactgaagtttgatatgacgttcggatgtcattggtcttgtcgtaccatggtcatggttttatctgtatatctggttacctttttttgtctttggagtctttattgtggtgtgtagatgttggtagactagaaactgtttggcttgttttcggtacccccttccgtaaggaataaattattcaccacgacccttttgaccgatcggtatacgtctttt

SEQ ID NO: 38 - DNA, 13001 bp, Homo sapien
tgttaatgtcagcttattctcaatcaattacaatggatatacatttgtgtcctaggtatatgctcatgaatctaaactcacaaacaggccaaagctttggaacatctgcataaagtatcctgtttcttatttgtattattactaaagtcatatgttttatctttatagcctaactgtccccttgggtgtttgaagacctaggtgatatgcccatttgtgatatgctctccagaaacagaagggttaagattactgtaagcttcagagatatagtgggtttgttctttggaatttggggaaatagaaaactcttatatttcattaaaaggtactcagaaatattttctgctggttggttgatgattcttagagcttaatggtattccttcctgttccctcctcctccttcatcaagttctagagaagaatatgtctcctttctctaaactttctagactcctgaacttttatctaccaagccctagcatgccacattaatacagaaatcagtacctgagtggcaatcgtgcatagccattgtcgacaaaaagagtcaaactctgtaaaatatttgaagagatttattctgagccaaatatgagtgaccatggcccatgacacagccctcaggaggtcctgagaacatgtgcccaaggtggttggggtacaacttattttatacattttaagaaggcatgagacatcaatcaaatacatttaagaaatacattggtttggtccagaaaggtgggacaattcaaagccatggtggggattccaggctatagataaatttaaacattttctggttgacaattggttgagtttatctaaggacctgggattatagaaaggaaatgttcaggttaagataaaagattgtggagaccaaggttcttttgaagtctaatagtggctgcccttagagacaatagatgacaaatgtttcctattcagatctttaaaaggtgctagacttttagttaatctctttaggattgggaaggcctggaagaataagatctagctatgttaatagagattctttacagatgcaaatttttccccacaaagaacagctttgcaaggccatttcaagatatggcaaagaagcatgttttggagtaaaatattttaattttcttccttgtcttgtaatgttatgccagagtcagattggaaagtaagtcacgatatatataaggttaaataaaacccatccgatgacaatttatgatttgtagggcatgacttcccagaccccttagataggaatttggacaagatgaaaaaatcagaatttagtcctcatcatgtatctttctcaaaaataatagattgatgggaacagatatttggggaccaaagaagccaaagtggttcccatccctttctctctgtaacttaacctctgtgacttggcaagccttcatgttctaggctataaagcggtaagggcaagagagaaaaaaataatagttgagtaccttttataggacatctctgttgtagatagcttttaaatattaaggttaagaacattgctctcactcttcctctgacccccccccaccaactcttttactttccagtttccaccattttgtgtagcccctcctagatttctcagttaatcatggagaatagaacaaggaagccactttcactctgcatttcatgaaaaagatatttctgcagcctgattctcatttacaaagtagcacctacaactatacattttttattccattaagcatttattttcaaaatttaaaccagtactgagaggcattaaacatgtaaattatttctctccatttaagaaatgatttggcaatgcatctaaagaaccatgaaaacatttataccacttgacataataatcaaagttctaaggaaagaaaaggctagaatgcaaaggtgttcattatagatctatggaaaaatcaaaagcagcctaacagttaaacaatcaaagatgatacatgctttatctcatttccacaaataccctttatcccatctgcaaattagactcacaggagcaaactcactctgtctcatctatcagtgtccagtactatataaaaacacaattcctttataaggcttttaactccagatatttatcagaggtcacatccaagtcatgaagggtcaagctctgccaatctccatgaagctctatactcttgagtgttagccagggaacagttgactagccactgcaggttagaagtttttctgaggtattcaaagcccaaatcactcacagaaaaagaatctgatttcagcctctccttcctctttcatatatatccccacactaagaagtactaagtagagtggagtttgagaaactgaacactccttactctagcccttgaggagtttataactataaaatttgtggcaaacataagctcagtctgagtccacaatatgacattcgtaaaattctaactttgtgattcttcttcaataaactcatttgtcatttttaatatcgtatttctctggctttggtcagaactttagcagagtgcagaagtacaatataattttctaaatatattttaagatattgaataaaagccaggcatggtggcccacacctgtaaacccagcattttgggaggccaaggcaggtggatcacttcaggtcaggagttcaagaccagcctggccaacatgatgaaaccccatttctaccaaaaatacaaaaattagccaggtgtggtggtgggtgcctgtaatcccagctactcaggaggctgaggcttaagaatcgcttgaacctgtgaagcagaggttgcagtgagccaagatcgtgccactgcactccagcctgggtgacacagtgagattctgtctcaaaaaaaaaaaaagatattgaataaaaagttattcaaccttgttattaaagtcacatattacaatcttatagcctgaccatccccctgggtgttgctaaacatgaaggctcctcccttcaggacttcacaaacacaatcttattgaaataactgaaagcttctgcttttgatatgagcagcagaggatcctggagattgatggttgtaagaggttatgtaagtttcacacagcattgggttaggtgtcagacttggatttgaaactatattttgtcacttattatctggatggtcttaggcacattgacttttttcattttttaattgtttttatatttgctggtttattataaaggatactacaaaggatatagatgaagagatgtgtaggatgaggtatagggaaagaggtatagagcttccatgccctccctgggtgtgccactctccaggaacctccatatgttcagctatccagaagctctttgaaccatgtcctcttgggtttttacataggcttcattacagaggcatggttgattaaaccattggccattggtaatcaacttgaccttcagcctctcttccctctccagagtttgggggatggggttgaaagcccaaccctctaatcatgcctttgtctttctggtgaccagccctaccctgaaggtgtcagtcaacattaccatataaaaagacagcactttggcgattccaagggttttaggagttatatgccaggaaactgggatgaagaccaaatatatattttaaaatatcacagtccacccctggtatttgaacctggatcctttacatcaaaagggcatgcaactcaaaagatattgaatcccattcagtcattaataattggtccaatccatcatcttgcattaatgtgtcccagggtgaggccactcaggtttacaggcttccttttaatcttgtcaggttccaaaagcagttgttgtctcagcaaacatataacttcacactttcaggcatctggaataactgggctaagaggcagtgtcatctcttgctgtctcttttgaagtatttatgtaatgtttaatttctctcaatttttaacccatttatttactcaaactcacttttggaagggatgttagaaacaccactgtgctggattgcaggcagcaatactagtctagcaagtgcctcctcctcagtctactcccattccaataaggtaaggttacataggtacagaactagtgggctatttttaccaccaggcaatatagctatatacattcactattagcctccattttgccaaatgtggaagcacaatccacccctagaagccttttaggaattctaacatagaggtttaaaggtaaagttttttgcttaaaaagcattcctgctattagtaggagttataattggagccctggtcctaggaccaccacatcaggtaagggagagaaaaaaatttgaggcaatttggagaagaacaaaaattatagtagttataccagtatactcctcctttggtaagaattgcagttttaccagcatcctccccagatcaaccagaaagacagattaaaaaaaaaatctaggccaggcgcgttggctcacgcctgtaatcccagcactttgggaggccgaggcgggtggatcacgaggtcaggagattgagaccatcctggctaacacggtgaaacctcgtctctactaaaaatacaaaaaaaaaaaaattagccaggcgtggtggcgggcacctgtagtcccagctactcgggaggctgaggcaggagaatggcatgaacccgggaggtggagcttgcagtgagctgagatagcaccactgcactccagcctcagtgacagagcgagactccctctcaaaaaaaaaaaaaaatctagtcctacttatgtactgtgagcacacacttgtgaaggatataagcaagcccttcatatctatttctcccccaatttagaaaaccaatatttcaattgctccttccttttggttccatatgaaattttaaagtagttttttctaattctgtgaagaaagtcaatggtagctttataagaatagcattgaatctataaattattttgggcactatagccattttcacgatattgattcttcctattcatgagcatggaatgtttttccatttgtttgtgtcctctcttattttcttcagtagtggtttgtagttctccttgaagaggtccttcacgtcccttgtgagttgtattctaggtattttattctctttgtagcagttgtgaatgggagttcactcatgatttggctctctgtttgtctattattgctgtataggaatgcttgtgatttttgcacattgattttgtatcctgagacttgcagcttaagaagattttgggctgagacgatggggttttctaaatacacaatcatgtcatctgcaagcagagacaatttgacttcctctcttcctgtttgcataccctttatttctttctcttgcctgattgccctggccagaacttccaatattatggtaaataggagtggtgagagaggtcttccttgtcttgtgccagttatcaaagggaatgcttccagcttttgcacacacagtatgatattggctgtgagtctgtcataaatagctcttatttatttaaggtatgttccatcaatacctagtttattgagtgtttttagcatgaagggtgttgaattttatcgaaggccttttctgtatctgttgagataatcatgtggtttttgtcatttgttctgtttatgtgatggattacgtttattgatttgtgtatgttgaaccagtcttgcatcccacggatgacaccaacttgatcgtggtggataatctttttggtgagctgctggatttggtttcccattattttattgaggatttttgcattaatgttcatcagggatattggcctgaaattttttttacattgtgtttctgccaggttttggtatcacagtgatgctggtctcataaaatgagttagggaggagtccctctttttctgttgtttggaatgatttcagaaggaatggtaccagctcctctttgtacctctggtagaatttggctgcgaatccatctggtcctgggctatttttggttggtaggctattaattactgcctcaattttagaacttgttatttgtttattcagggatttgatgtcttcttgcttcagtcttgagagggtgcatgtgtccaggaatttatctatttcttctagattttctaatttatttgcatagaggtgtttatagtattctctgatggtagttggtatttctgtgggatcagtggtgatatcccctttattattttttattgtgcctatttgattcttctctcttttcttatttgtcttactagtggtctatgtattttgttaaaatttccaaaaaactagctcctgaattcattaattttttgaaaggttttttatgtccctatctccttcagttctactctgatcttagttatttcttgccttctgctagcttttgaatttgtttgctcttgcttctctagttcttttaattgtgatgttagagtattgattttaaatctttcctgctttctgatgtgagcatttcatgctataaattttcctcttaacactgctttagctgtgtcccagagattcaggtacattgtctcttttttctcattttcaaagaacttatttatttcttccttaacttcattatttacctagtagtcattcaagagaaggttgttcagtttccatgtagttgtgtggatttgaacgagtttctgaatcctgagttctaatttgattgcactgtggtctgagagactgttatgatatctgttcttttgcgtttgctgaggagtgttttacttccaactatgtggtcaactttagaataagtgccatgtggtgctgagaagaacatatattctgttgatttttgttggagagttctgtagaggtctattagttctgcttggtccaaagctgagttcaagtcctgaatatccttgttaattttctgtctcattgatctgtttaatattgacagtggggtgttaaaatctcccactattatcatgtgggagtctaagtctctttgtgggtctgtaagaacttgttttatgaatctgggtgctcctgtattgggtgcatatatatttgggataattagctcttctcgttgaattgatccctttaccattatgtatgtccttctttgtctcttttgatatttgttgatttaaattctgttttatcagaggctaggattgcaacccatggttttctttttttgtttgttttttgttttgttttgttttctattttcttggtaaatattcctccatccctttattttgagcctatgtgtgtctttgcacatgagatgggtctcctgaatacagcacactgatggcttttgactctttatccaatttgttagtctatgtcttttaattggggcacttagcctgtttacatttaaggttaatattgttatatgtgaatttgatcctgtcatcatgatgccagctagttattttgcacattagttgatgcagtttcttcatagtgttgttggtctttatattttggtatgtttttacagtgactggtacccatttttcctttccatatttagtgcttttttcaggagctcttgtaaggcaggcctggtggtgacaaaatccctcagcatttgcttgtctgtagagaattttatttctccttcgcttatgaagcttagttttagctggatatgaaattctgggttgaaaattatttgctttaagaatgttggatattggcccccgctctcttctggcttgtagggtatgtacagaaagatccactgttagtctgatggacttccttttgtaagtaacctgacctttctctctggctgcccttaacatttttttcttcatttcaaccttggtgaatctgatgattatgtgtcgtaaggttgctcttctcgaggagtatcagccagtctggtagaatgaataaaagccactataaggtctgtttaccctgagaaggggactgcccaactctccctataaaatgccaagtggcgcaccctacatgaagcagctgatatgcttcatatgcaagtcatgttggactggctttaccatgatattcgcccactgaatatgcccattacccagaccatggtaaatgctacggttcaaagggacccttctacatgggtatcctgggtgccattactcctacagaatcaaacaatggttcaagaagccttatcaaatatgctgttgcagcttttcctcatgagtcttacaggtgctaataaaacataaggataattaaccaaaaaaaatgagaaaggcaaaaggggagtcaaaggactcatcttagaagggtagaaatctttagatggttattaagaaatgaaatagccaggcacagggctcattcctataatcccagcactttgggtgaccgaggcaggcagatcacttgaggtcaggagttcaagaccagcctggccaacatggtcaaaccccatctttatgaaaaatacaaaaattagccgaatgtggtggcatgtgcctgtaagagtatgaattcccctggagtctgtggtttccaagggctctatgcactcatgctagcccacacttggcctttagatgtttaacttttaatcgaattcctcatacttgcttatatggaggccttatcttcccattgacacaggtgagccagtgttcatgttctgtcttttcttgaaaaagtccatctttccttagagttcaggctagttagttgccctgcaccctcagctcttcaataaattcaaggtttgttttgatttttttgagacagagtctcactctgtcacctaggctggagtgcaatggcatgatcttggctcaccacaactgcagcctcccaggttcaagcaattctcctacctcagcctcctgagtaactgggactacaggcacatgccaccacacccaactaatttttgtatttttagtagagataggatttcaccatgctggccaggctggtcttgaactcctagacctcaggtgatctgcccaccttggccacccaaagtgctaggattacaggtgtgagccaccatgcctggcctcaagttatgattttttagtttatcggtatttttcttattgttatgtggaggacactgcgtttgccaggttttttgtttttgtttttgtttttgttttttgagatggagtattgctctgtcgcccaggctggaggacagtgatgcgatcttggctcgctgcaatctctgcctcccaggttcaaatgattctcctgcctcagcctcccaagtagctgggattacagttgcatgacaccacacctggctaatttttgtatttttagtagagtcagagtttcaccgtgttggtcaggctgatctcaaactcctgacctcaggtgatccacccaccttggcctcccaaaatgctgggattacaggcatgagccaccacgcccggctgcctttgccagttttctacatcctatgtggaacccagaaatccctgatgtccatttgtgttgtagttatctagttttttttctagttgttacagtgggaataatggtctttcactatcttctacattctgacccaaagccaaatgtcataataacctttctgaaacataaattggatcataacactcctttgctttctatccttcagtggtttctaatcatacatcaaactttaaaaataataaaattcaaaatttttcttttgcttgtaatatcctgcatgatcttgggtctttttgctgtcttttttttctatcttttcaaacacatctcatgccattctccttattttctatactccagccaaggagttggcaatcttttcttataaagggcctgatactcattattttaggcttttgggccacatggtctctgttgcaactacaactcttctgttgaagcacgaagcagctatagacaatatataaatgcattagctttgctgtattccaataaaactttattaatggacattgaaatttgaatttaatatattttttgtttgtcatgaaatattctataatttttttcttccaaccatttaaaaatgtaaaagatcagctgggtgtggtggctcacacctgtaatcccagcactttgggaggctgaggtgggtggatcacgagatcaggaattcaagaccagcgtggccaacatggtgaaaccctgtctctactaaaaatacaaaaattagctgagcatgatggtgcacactgtaatcccagctactcagcaggctgtggcaggagaatcacttgaacccaggaggtagaggttgcagtgagccgagatcgcgccagtgcactccatcctgggcaacagaacaagactccaactcgaaaaaaaaatcaataaaaatgtaaaagatcattcttagcttggaggctataaaaaaggatgcagcatgtcagatttggcccattagctgcagtttcctgacctctatctacctcaattggttctttacttacattacatggaaagtgcaaacttggatggcttcaatgtctggcttcttttatttatttatttatttatttatttatttatttatttattttttgagacggggtctcgctgtggcccgggctggagtgcagtggcacgatctctgctcactgcaagctccacctcctgggttcacaccattctcctgcctcagcctcccgaatagctggaactacaggtgcacgccaccacgcttggctaattttttatatttttagtagagacggggtttcactgtgttagttagccaggatggtctcgatctcctgacctcatgatccgcccatctcggcctcccaaagtgctgggattacaggtgtgagccaccgtgcccggctggctggcttctttttacccttcacatctggctttaaatactaccttttcacagatttcttctctaatcactctttctaaagtaaatatgctgtttttcattattagtcattgcatcctatttctttccctttaattttcttatcacaatgtataattatatgtttttttttttttttggttattgcctgtctccctcaatagatcataagttccatttgataaggtacaatgtctgttggtttattagccagtgcctaacactaccatttaatatgtattcaatgaatatttgttaaatgtattgattgaatttaaagtgactactcagcctacttctgccccttggagcttggattgtttcttcaaaggtattgatccttttgactattttaattatgaattcactaaagacatctggaaggcttattgtgtcaagcagtgccaaatccatggcttgatgaacctagatccatccccttcccctttccatatcacagatgacaacttgatggttggcctatgacttgtaaaagttgtcatatttgaattctgaaatttctctaattttcttgggaagcagaaaggaaaaattagtagttggcctcaaagggacagttgaatttcacatataatgagcaaagtagtgtgaggaagagaggagggccttttcttttgaggtcataactaaaagttaggtgagcaaatgccataagcatgaaaatagcaaaccaagcttcttggtttctatccaaaggctttgttgggaaaagtatcaaagtgtgttcatttgttatgtaatatataaggtagagaacccaatttgaaggaggtggaataactttccaaaatacttatggctaaattctcagttgatcttggaataagattcaagaatccaaatgcacccttctttgttatcttgctagaaaacatgctgggcatggtggctcatgcctgtaatcccaacacgttgagaggccgaggtgggcagatcacgagatcaggagttggagaccagcctgatcaacatggtgaagccccgtctctactaaaaatacaaaaattagccagacatagtggcacgcacctataatccgtgctactcaggaggtaggcaggagaattgctggaacccgggaggtggagtttgcagtgagccaagatcacaccactgcaatccagcctgggtgacagagcgagactctgtctcaaaaaaaaaagaaaagaaaaaagaaaagaaagaaaaaagggaagggaaggaaaggggggaggggagggaagggaagggaagggaaggtaagggaagggaagggaagggaagggaaaagggaaaacaatgtgcttttacccacagctgataagcttttctaattgtctacctttgggttaaactttatcattgagtgtttttatcccattatgaaagaattaaggtttgaaggactgaggtaagggtggatatttactcttaattgagtagcttaaccaagtcaagccacagattagctgaagccaaaaagcactggcagcatttgaaataactgagaacatattatacttaacactttattatctaagagaggcacttgaagttgagacctagaaatttgattctgggttctttgtttctaaggggcagggtgaacccagctatagcattcacagatgctatagaattatatatattctatatataattatatatattacattcatattaatatatgttaatatattctatattattcatatagaattcacagataatccaagtgcttttttaatacattgataccaaatctctcctgctctcaaaaaaaaaagcccaaggcaaaaatttttgattagcctgtatccgcaaattcatagtgcatggcatgatgggtactctacatccctcctcctattgcactcactgtgcccagatgaacctaaagtcaccagtaatagtgctaatgtagtaatgggcccaagcttcaaaagaaggaaaattagtattcagtatttaaatgtgggaaagaggaagaatatggaaattatcaattttataatacctatacatattcttacctgcattaatgtgaatagacatcaatgataaacagaataatgccccataaagatgtctacactgtaatctccaaaacttataactatactatatcaca

SEQ ID NO: 39 - DNA, 130001 bp, Homo sapien
tgttaatgtcagcttattctcaatcaattacaatggatatacatttgtgtcctaggtatatgctcatgaatctaaactcacaaacaggccaaagctttggaacatctgcataaagtatcctgtttcttatttgtattattactaaagtcatatgttttatctttatagcctaactgtccccttgggtgtttgaagacctaggtgatatgcccatttgtgatatgctctccagaaacagaagggttaagattactgtaagcttcagagatatagtgggtttgttctttggaatttggggaaatagaaaactcttatatttcattaaaaggtactcagaaatattttctgctggttggttgatgattcttagagcttaatggtattccttcctgttccctcctcctccttcatcaagttctagagaagaatatgtctcctttctctaaactttctagactcctgaacttttatctaccaagccctagcatgccacattaatacagaaatcagtacctgagtggcaatcgtgcatagccattgtcgacaaaaagagtcaaactctgtaaaatatttgaagagatttattctgagccaaatatgagtgaccatggcccatgacacagccctcaggaggtcctgagaacatgtgcccaaggtggttggggtacaacttattttatacattttaagaaggcatgagacatcaatcaaatacatttaagaaatacattggtttggtccagaaaggtgggacaattcaaagccatggtggggattccaggctatagataaatttaaacattttctggttgacaattggttgagtttatctaaggacctgggattatagaaaggaaatgttcaggttaagataaaagattgtggagaccaaggttcttttgaagtctaatagtggctgcccttagagacaatagatgacaaatgtttcctattcagatctttaaaaggtgctagacttttagttaatctctttaggattgggaaggcctggaagaataagatctagctatgttaatagagattctttacagatgcaaatttttccccacaaagaacagctttgcaaggccatttcaagatatggcaaagaagcatgttttggagtaaaatattttaattttcttccttgtcttgtaatgttatgccagagtcagattggaaagtaagtcacgatatatataaggttaaataaaacccatccgatgacaatttatgatttgtagggcatgacttcccagaccccttagataggaatttggacaagatgaaaaaatcagaatttagtcctcatcatgtatctttctcaaaaataatagattgatgggaacagatatttggggaccaaagaagccaaagtggttcccatccctttctctctgtaacttaacctctgtgacttggcaagccttcatgttctaggctataaagcggtaagggcaagagagaaaaaaataatagttgagtaccttttataggacatctctgttgtagatagcttttaaatattaaggttaagaacattgctctcactcttcctctgacccccccccaccaactcttttactttccagtttccaccattttgtgtagcccctcctagatttctcagttaatcatggagaatagaacaaggaagccactttcactctgcatttcatgaaaaagatatttctgcagcctgattctcatttacaaagtagcacctacaactatacattttttattccattaagcatttattttcaaaatttaaaccagtactgagaggcattaaacatgtaaattatttctctccatttaagaaatgatttggcaatgcatctaaagaaccatgaaaacatttataccacttgacataataatcaaagttctaaggaaagaaaaggctagaatgcaaaggtgttcattatagatctatggaaaaatcaaaagcagcctaacagttaaacaatcaaagatgatacatgctttatctcatttccacaaataccctttatcccatctgcaaattagactcacaggagcaaactcactctgtctcatctatcagtgtccagtactatataaaaacacaattcctttataaggcttttaactccagatatttatcagaggtcacatccaagtcatgaagggtcaagctctgccaatctccatgaagctctatactcttgagtgttagccagggaacagttgactagccactgcaggttagaagtttttctgaggtattcaaagcccaaatcactcacagaaaaagaatctgatttcagcctctccttcctctttcatatatatccccacactaagaagtactaagtagagtggagtttgagaaactgaacactccttactctagcccttgaggagtttataactataaaatttgtggcaaacataagctcagtctgagtccacaatatgacattcgtaaaattctaactttgtgattcttcttcaataaactcatttgtcatttttaatatcgtatttctctggctttggtcagaactttagcagagtgcagaagtacaatataattttctaaatatattttaagatattgaataaaagccaggcatggtggcccacacctgtaaacccagcattttgggaggccaaggcaggtggatcacttcaggtcaggagttcaagaccagcctggccaacatgatgaaaccccatttctaccaaaaatacaaaaattagccaggtgtggtggtgggtgcctgtaatcccagctactcaggaggctgaggcttaagaatcgcttgaacctgtgaagcagaggttgcagtgagccaagatcgtgccactgcactccagcctgggtgacacagtgagattctgtctcaaaaaaaaaaaaagatattgaataaaaagttattcaaccttgttattaaagtcacatattacaatcttatagcctgaccatccccctgggtgttgctaaacatgaaggctcctcccttcaggacttcacaaacacaatcttattgaaataactgaaagcttctgcttttgatatgagcagcagaggatcctggagattgatggttgtaagaggttatgtaagtttcacacagcattgggttaggtgtcagacttggatttgaaactatattttgtcacttattatctggatggtcttaggcacattgacttttttcattttttaattgtttttatatttgctggtttattataaaggatactacaaaggatatagatgaagagatgtgtaggatgaggtatagggaaagaggtatagagcttccatgccctccctgggtgtgccactctccaggaacctccatatgttcagctatccagaagctctttgaaccatgtcctcttgggtttttacataggcttcattacagaggcatggttgattaaaccattggccattggtaatcaacttgaccttcagcctctcttccctctccagagtttgggggatggggttgaaagcccaaccctctaatcatgcctttgtctttctggtgaccagccctaccctgaaggtgtcagtcaacattaccatataaaaagacagcactttggcgattccaagggttttaggagttatatgccaggaaactgggatgaagaccaaatatatattttaaaatatcacagtccacccctggtatttgaacctggatcctttacatcaaaagggcatgcaactcaaaagatattgaatcccattcagtcattaataattggtccaatccatcatcttgcattaatgtgtcccagggtgaggccactcaggtttacaggcttccttttaatcttgtcaggttccaaaagcagttgttgtctcagcaaacatataacttcacactttcaggcatctggaataactgggctaagaggcagtgtcatctcttgctgtctcttttgaagtatttatgtaatgtttaatttctctcaatttttaacccatttatttactcaaactcacttttggaagggatgttagaaacaccactgtgctggattgcaggcagcaatactagtctagcaagtgcctcctcctcagtctactcccattccaataaggtaaggttacataggtacagaactagtgggctatttttaccaccaggcaatatagctatatacattcactattagcctccattttgccaaatgtggaagcacaatccacccctagaagccttttaggaattctaacatagaggtttaaaggtaaagttttttgcttaaaaagcattcctgctattagtaggagttataattggagccctggtcctaggaccaccacatcaggtaagggagagaaaaaaatttgaggcaatttggagaagaacaaaaattatagtagttataccagtatactcctcctttggtaagaattgcagttttaccagcatcctccccagatcaaccagaaagacagattaaaaaaaaaatctaggccaggcgcgttggctcacgcctgtaatcccagcactttgggaggccgaggcgggtggatcacgaggtcaggagattgagaccatcctggctaacacggtgaaacctcgtctctactaaaaatacaaaaaaaaaaaaattagccaggcgtggtggcgggcacctgtagtcccagctactcgggaggctgaggcaggagaatggcatgaacccgggaggtggagcttgcagtgagctgagatagcaccactgcactccagcctcagtgacagagcgagactccctctcaaaaaaaaaaaaaaatctagtcctacttatgtactgtgagcacacacttgtgaaggatataagcaagcccttcatatctatttctcccccaatttagaaaaccaatatttcaattgctccttccttttggttccatatgaaattttaaagtagttttttctaattctgtgaagaaagtcaatggtagctttataagaatagcattgaatctataaattattttgggcactatagccattttcacgatattgattcttcctattcatgagcatggaatgtttttccatttgtttgtgtcctctcttattttcttcagtagtggtttgtagttctccttgaagaggtccttcacgtcccttgtgagttgtattctaggtattttattctctttgtagcagttgtgaatgggagttcactcatgatttggctctctgtttgtctattattgctgtataggaatgcttgtgatttttgcacattgattttgtatcctgagacttgcagcttaagaagattttgggctgagacgatggggttttctaaatacacaatcatgtcatctgcaagcagagacaatttgacttcctctcttcctgtttgcataccctttatttctttctcttgcctgattgccctggccagaacttccaatattatggtaaataggagtggtgagagaggtcttccttgtcttgtgccagttatcaaagggaatgcttccagcttttgcacacacagtatgatattggctgtgagtctgtcataaatagctcttatttatttaaggtatgttccatcaatacctagtttattgagtgtttttagcatgaagggtgttgaattttatcgaaggccttttctgtatctgttgagataatcatgtggtttttgtcatttgttctgtttatgtgatggattacgtttattgatttgtgtatgttgaaccagtcttgcatcccacggatgacaccaacttgatcgtggtggataatctttttggtgagctgctggatttggtttcccattattttattgaggatttttgcattaatgttcatcagggatattggcctgaaattttttttacattgtgtttctgccaggttttggtatcacagtgatgctggtctcataaaatgagttagggaggagtccctctttttctgttgtttggaatgatttcagaaggaatggtaccagctcctctttgtacctctggtagaatttggctgcgaatccatctggtcctgggctatttttggttggtaggctattaattactgcctcaattttagaacttgttatttgtttattcagggatttgatgtcttcttgcttcagtcttgagagggtgcatgtgtccaggaatttatctatttcttctagattttctaatttatttgcatagaggtgtttatagtattctctgatggtagttggtatttctgtgggatcagtggtgatatcccctttattattttttattgtgcctatttgattcttctctcttttcttatttgtcttactagtggtctatgtattttgttaaaatttccaaaaaactagctcctgaattcattaattttttgaaaggttttttatgtccctatctccttcagttctactctgatcttagttatttcttgccttctgctagcttttgaatttgtttgctcttgcttctctagttcttttaattgtgatgttagagtattgattttaaatctttcctgctttctgatgtgagcatttcatgctataaattttcctcttaacactgctttagctgtgtcccagagattcaggtacattgtctcttttttctcattttcaaagaacttatttatttcttccttaacttcattatttacctagtagtcattcaagagaaggttgttcagtttccatgtagttgtgtggatttgaacgagtttctgaatcctgagttctaatttgattgcactgtggtctgagagactgttatgatatctgttcttttgcgtttgctgaggagtgttttacttccaactatgtggtcaactttagaataagtgccatgtggtgctgagaagaacatatattctgttgatttttgttggagagttctgtagaggtctattagttctgcttggtccaaagctgagttcaagtcctgaatatccttgttaattttctgtctcattgatctgtttaatattgacagtggggtgttaaaatctcccactattatcatgtgggagtctaagtctctttgtgggtctgtaagaacttgttttatgaatctgggtgctcctgtattgggtgcatatatatttgggataattagctcttctcgttgaattgatccctttaccattatgtatgtccttctttgtctcttttgatatttgttgatttaaattctgttttatcagaggctaggattgcaacccatggttttctttttttgtttgttttttgttttgttttgttttctattttcttggtaaatattcctccatccctttattttgagcctatgtgtgtctttgcacatgagatgggtctcctgaatacagcacactgatggcttttgactctttatccaatttgttagtctatgtcttttaattggggcacttagcctgtttacatttaaggttaatattgttatatgtgaatttgatcctgtcatcatgatgccagctagttattttgcacattagttgatgcagtttcttcatagtgttgttggtctttatattttggtatgtttttacagtgactggtacccatttttcctttccatatttagtgcttttttcaggagctcttgtaaggcaggcctggtggtgacaaaatccctcagcatttgcttgtctgtagagaattttatttctccttcgcttatgaagcttagttttagctggatatgaaattctgggttgaaaattatttgctttaagaatgttggatattggcccccgctctcttctggcttgtagggtatgtacagaaagatccactgttagtctgatggacttccttttgtaagtaacctgacctttctctctggctgcccttaacatttttttcttcatttcaaccttggtgaatctgatgattatgtgtcgtaaggttgctcttctcgaggagtatcagccagtctggtagaatgaataaaagccactataaggtctgtttaccctgagaaggggactgcccaactctccctataaaatgccaagtggcgcaccctacatgaagcagctgatatgcttcatatgcaagtcatgttggactggctttaccatgatattcgcccactgaatatgcccattacccagaccatggtaaatgctacggttcaaagggacccttctacatgggtatcctgggtgccattactcctacagaatcaaacaatggttcaagaagccttatcaaatatgctgttgcagcttttcctcatgagtcttacaggtgctaataaaacataaggataattaaccaaaaaaaatgagaaaggcaaaaggggagtcaaaggactcatcttagaagggtagaaatctttagatggttattaagaaatgaaatagccaggcacagggctcattcctataatcccagcactttgggtgaccgaggcaggcagatcacttgaggtcaggagttcaagaccagcctggccaacatggtcaaaccccatctttatgaaaaatacaaaaattagccgaatgtggtggcatgtgcctgtaagagtatgaattcccctggagtctgtggtttccaagggctctatgcactcatgctagcccacacttggcctttagatgtttaacttttaatcgaattcctcatacttgcttatatggaggccttatcttcccattgacacaggtgagccagtgttcatgttctgtcttttcttgaaaaagtccatctttccttagagttcaggctagttagttgccctgcaccctcagctcttcaataaattcaaggtttgttttgatttttttgagacagagtctcactctgtcacctaggctggagtgcaatggcatgatcttggctcaccacaactgcagcctcccaggttcaagcaattctcctacctcagcctcctgagtaactgggactacaggcacatgccaccacacccaactaatttttgtatttttagtagagataggatttcaccatgctggccaggctggtcttgaactcctagacctcaggtgatctgcccaccttggccacccaaagtgctaggattacaggtgtgagccaccatgcctggcctcaagttatgattttttagtttatcggtatttttcttattgttatgtggaggacactgcgtttgccaggttttttgtttttgtttttgtttttgttttttgagatggagtattgctctgtcgcccaggctggaggacagtgatgcgatcttggctcgctgcaatctctgcctcccaggttcaaatgattctcctgcctcagcctcccaagtagctgggattacagttgcatgacaccacacctggctaatttttgtatttttagtagagtcagagtttcaccgtgttggtcaggctgatctcaaactcctgacctcaggtgatccacccaccttggcctcccaaaatgctgggattacaggcatgagccaccacgcccggctgcctttgccagttttctacatcctatgtggaacccagaaatccctgatgtccatttgtgttgtagttatctagttttttttctagttgttacagtgggaataatggtctttcactatcttctacattctgacccaaagccaaatgtcataataacctttctgaaacataaattggatcataacactcctttgctttctatccttcagtggtttctaatcatacatcaaactttaaaaataataaaattcaaaatttttcttttgcttgtaatatcctgcatgatcttgggtctttttgctgtcttttttttctatcttttcaaacacatctcatgccattctccttattttctatactccagccaaggagttggcaatcttttcttataaagggcctgatactcattattttaggcttttgggccacatggtctctgttgcaactacaactcttctgttgaagcacgaagcagctatagacaatatataaatgcattagctttgctgtattccaataaaactttattaatggacattgaaatttgaatttaatatattttttgtttgtcatgaaatattctataatttttttcttccaaccatttaaaaatgtaaaagatcagctgggtgtggtggctcacacctgtaatcccagcactttgggaggctgaggtgggtggatcacgagatcaggaattcaagaccagcgtggccaacatggtgaaaccctgtctctactaaaaatacaaaaattagctgagcatgatggtgcacactgtaatcccagctactcagcaggctgtggcaggagaatcacttgaacccaggaggtagaggttgcagtgagccgagatcgcgccagtgcactccatcctgggcaacagaacaagactccaactcgaaaaaaaaatcaataaaaatgtaaaagatcattcttagcttggaggctataaaaaaggatgcagcatgtcagatttggcccattagctgcagtttcctgacctctatctacctcaattggttctttacttacattacatggaaagtgcaaacttggatggcttcaatgtctggcttcttttatttatttatttatttatttatttatttatttatttattttttgagacggggtctcgctgtggcccgggctggagtgcagtggcacgatctctgctcactgcaagctccacctcctgggttcacaccattctcctgcctcagcctcccgaatagctggaactacaggtgcacgccaccacgcttggctaattttttatatttttagtagagacggggtttcactgtgttagttagccaggatggtctcgatctcctgacctcatgatccgcccatctcggcctcccaaagtgctgggattacaggtgtgagccaccgtgcccggctggctggcttctttttacccttcacatctggctttaaatactaccttttcacagatttcttctctaatcactctttctaaagtaaatatgctgtttttcattattagtcattgcatcctatttctttccctttaattttcttatcacaatgtataattatatgtttttttttttttttggttattgcctgtctccctcaatagatcataagttccatttgataaggtacaatgtctgttggtttattagccagtgcctaacactaccatttaatatgtattcaatgaatatttgttaaatgtattgattgaatttaaagtgactactcagcctacttctgccccttggagcttggattgtttcttcaaaggtattgatccttttgactattttaattatgaattcactaaagacatctggaaggcttattgtgtcaagcagtgccaaatccatggcttgatgaacctagatccatccccttcccctttccatatcacagatgacaacttgatggttggcctatgacttgtaaaagttgtcatatttgaattctgaaatttctctaattttcttgggaagcagaaaggaaaaattagtagttggcctcaaagggacagttgaatttcacatataatgagcaaagtagtgtgaggaagagaggagggccttttcttttgaggtcataactaaaagttaggtgagcaaatgccataagcatgaaaatagcaaaccaagcttcttggtttctatccaaaggctttgttgggaaaagtatcaaagtgtgttcatttgttatgtaatatataaggtagagaacccaatttgaaggaggtggaataactttccaaaatacttatggctaaattctcagttgatcttggaataagattcaagaatccaaatgcacccttctttgttatcttgctagaaaacatgctgggcatggtggctcatgcctgtaatcccaacacgttgagaggccgaggtgggcagatcacgagatcaggagttggagaccagcctgatcaacatggtgaagccccgtctctactaaaaatacaaaaattagccagacatagtggcacgcacctataatccgtgctactcaggaggtaggcaggagaattgctggaacccgggaggtggagtttgcagtgagccaagatcacaccactgcaatccagcctgggtgacagagcgagactctgtctcaaaaaaaaaagaaaagaaaaaagaaaagaaagaaaaaagggaagggaaggaaaggggggaggggagggaagggaagggaagggaaggtaagggaagggaagggaagggaagggaaaagggaaaacaatgtgcttttacccacagctgataagcttttctaattgtctacctttgggttaaactttatcattgagtgtttttatcccattatgaaagaattaaggtttgaaggactgaggtaagggtggatatttactcttaattgagtagcttaaccaagtcaagccacagattagctgaagccaaaaagcactggcagcatttgaaataactgagaacatattatacttaacactttattatctaagagaggcacttgaagttgagacctagaaatttgattctgggttctttgtttctaaggggcagggtgaacccagctatagcattcacagatgctatagaattatatatattctatatataattatatatattacattcatattaatatatgttaatatattctatattattcatatagaattcacagataatccaagtgcttttttaatacattgataccaaatctctcctgctctcaaaaaaaaaagcccaaggcaaaaatttttgattagcctgtatccgcaaattcatagtgcatggcatgatgggtactctacatccctcctcctattgcactcactgtgcccagatgaacctaaagtcaccagtaatagtgctaatgtagtaatgggcccaagcttcaaaagaaggaaaattagtattcagtatttaaatgtgggaaagaggaagaatatggaaattatcaattttataatacctatacatattcttacctgcattaatgtgaatagacatcaatgataaacagaataatgccccataaagatgtctacactgtaatctccaaaacttataactatactatatcacatggcaagagggaattaaggttactaatcagctgaccttgagatgggagattctcctggtttgtatgggtgggcccaatgtaatcacagggtccttataaatggaaaaggcagacaggagattcagtgtcagactgatacaatgagggaaagactaccagcagttgatggctttgaagatagaagaagggggccatgagccaagaaatgtgagtagcctctagaagctgaaaaaggcaagaaaacggattcttccctagaatctccagaaatgcagccctgccaacatggtgattttaactcaatgagatgcattttagacttctgacatctagaattgtgttattttcagccctcaagtttgtggtaatttgttacagcagcattaagaaaatgtacaatgaccatgtgcagtgcctcatgcttgtaatcccagcactttgggaggccaaggtgggtggatcgcttgagtccaagagttcgagaccagcctgggaaacatggtgaaaccttgtctctacaaaaacacaaaaattagcctggtgtggttgtgtggacctgtagtcccagctactctggaggctgaggtgggaggatggcttaaacccataaggtggagattacaatgagccaagatcatgccactgcactccagcctggacagtagagccagaacttctctcaaaaaaataaaaaagaaagaaactatacaatgctcctgtgattctagtgctatgtacatatatcctttatagggaattaaggaggttatagacacaaccagaagaggaggcatggaatagactaatgtataatggataggaaagtgtatcttttacaacttctctgtaaaaacaccttcacctactttatgagtttgcctcagctgccataacaaaatatcagaccaagtggcttaaataacaatttattttctcacagttctggaggctagaagtctaagatgaaagtgccagcaagtttgatttctggtgaagtctctcttccttgcttgccaatggccgctttctcactgtgtcttcaaatgtccttcctctgagtatgtgaggagagagaggtttgatgcctcttcaccttcttataaggacaccagtcctactggattagggctccacccttatgacctcatttaaccttaattacctccttaaaggttctatctccaaatacagtcacatttggagtcagacctacaacatatgaattttgagaggacacaattcagtctataacacctagatggaaggcaatttcatataaagatgatatgcagtctatgacagcaaagtagctagtggaaatcacaacccctaattctatttttatgtcattccctaagtccaggtcccatgtggatatagcattgttcagggctatctctttgctgttctttttttttttttagactcacacaagcaatgtggagaaggaacatgaaaacatctttgagatagagcttaatacagatgtcaatctctttgtaaataagcaattaaaagtggaaccactgtccaccatgtgagaagagtgactggctatggctggatatttttaaatacacataaaatgtggtataaatggtagaatgccagggatagaaggagtatcttataagttacctagtcaacgttctggcttctgggcagaaaactatctaaactcagccagataatcagtttcaactaaatcaggaaaacatggaatcatctttatctaggtagtgttatagttacattgcctcatttatctacacatcaataaattctttctcattgctaatatttatcattcttatcatagtataagcaaatgttttaattctattatggtaaagataaagcttctgtaattaaaacactttaatctggaaagacagcagtaaacccttcaagcaaaagcccaagtaggttcaaaaataatagccagagaggttaaaggtaaaccaatagagtgatatgttacagcaactaagggagagaggcaggagttttttaaaagagagaagaggaattataacaacagaaacaggttagccagctgccagtttagatgagcataatgagtcccttagatagatcattggtgatttttatcaaaacactatcggtggagttgtgggagtggtaggctgactatagtggattggggaattaaatagtgatgaacccaaaacagaaagtctgaagaaattccctttgagccaaaaaaaaaaaaggccgggtgcagtggctcacacccataatcccagcactttgggaggccgaggtgggaggatcacctgaggtcaggagttcaagacaagcctggccaacatggtgactctactaaacattgtctctactaaaagatacaaaaattagccggaagtggtggcaggcaacttaatcccagctacttgggaggcagaggcaggagaattgtttgaacccgggaggtggaggttgcactgagctgagatcgagccattgcactcaaacctgggggacaagagggagacttctctaaaaaaaaaaaattccctttgagcatctctactgtagagatgaaataagagagaagtggattctttagtatagagatggaaaggtatggagctagaacatgtgggttgtgaacagtggctaactaaaccaggaccagtaacctagatatcacattgggcttaattgctgggttattcattcattcaggcaacatgtatttgttgagagcctgaatgtgccaggtaatagaaacacaaaggtggttaaaatagaccttggcctctgtcttcaggaagcttccagtctgaagagggatgaagacatatattaatcaaacaatcccacaaatgcaggtataatctgcataaactgacaaatatatctactttggagtcaagaaattaagagaaatcactgatgtgatcagtgaacaagtaagatttattaggaagatggaaggatgacattacttcaaatatattacaggaaaccccaaccatggtaacaacatcaggcctatctttacatatgtttaataatgcttaacttcacttttgctcctatcctccccaaagcaatcttcaagttcttctgtatctttgttttattttctttgttcttttttgtctcatttcctatactgtttttattccatactttgacagttcagtgaactcctttgatagatcccaagtcctcctttttcaatatttacacttataatcatttttgatcactccaaaactgagaactttgagtgtagattttctaggcttcttattttatttttagacattatatagaaaaattagagggaagggaaaagaaggatggcaacatggtaactgggacagtgttcaaaaggtctaagtcctacttctcactccatacaaattatctgcaatttttttatttttgagacaggctcttatctctcacctgggctagagtgcagtggcacaatcatagctcactataaccttgaactccagggctcaagggatccttccatttcggcctcccgagtagttaggactacaggtgtgtgccactacacacagctagtttttaatttttttttattttcatagacacagggtctcactatgttgctcaaactggtcttgaactcctggccccaagcaatcctcctgccttggcctcccaaagttctagaattgttacaggaaagaggtcccaatccaggcccaaagagattttatttatgtactagtgtggagcctagcctaggacacatcaagcagaagtgcagataaggtctgactctttccagtacagctagggtgcctggctctccacatgtccccagaccttatctagaatctaatgtctccaaggtaggtacattgaataattttcaaaagtcaaggaagcagtttatgaccttaaagtagttagcaaacttaatatctgacctgactaatttagaccaaatgtttacatttttgaagatatttttattttatcagtaatctttaaaactattttctattttccaaagattacttaagtcaaatgaactaaaaggcattatacattttagttttctgatgaaatatctgatttaagcacttattatttttgaaccaattaaagcttttttatatcacacacacaacacatataaatacacagacaggctgggtgcagtggctcacacttgtaatcccagcactttgggtggccaaggcaggcggatcacgtgaggtcaggagtttgagagcagcctggtcaatgtggtaaaaccccatctccactaaaaatacaaaaattagctgggcatggtggaggatgcctgtaatcccagctactcaggaggctgaggcaggaggatagcttgaacccaggaggtagaggttgcagtgagccaagattgtgccactgcactccaggctgggtgacagagggagaccctgtctcaaaaaattaataaataaatacacagaagaagataaaggacttatcccctaaggcaggaatcaaaccctgaacacaggccaccattgtgaaaagaaaaagcacagccacatggttacaaggtcaagctcccaaggacatacaaaacaagaaggaaacctcatccagttttttcagggacctgcagcaaagtttgtacctgataaatttactgggccatcttgaacagcaggtttacaggtgtcctaagctcatgttctatcctaagatacccctctttatgacagaacaatacagaaagacacacaacagatttgctacaacttaagactagcctcataaatccattttttcactaatcaaaactttacagaggaaatgaacagtgatttttgccatccattcaaccagttttatagagagagagagaggaaagcattgcctgaggcagggtggggaaggcccggcactccgagtgccagagaaagccccacccattgcagcaacactgaaaagttcatgcagctgcttgtcagtcatgaacggattttttccagcagtcccatcagctctcatttccctttttaggagggaaaagctccccatgttctacaatcctctacatgcctaattctgtcaaccatagccatcagcaaagagtgcaaggcagatcaatccaaagagaatagcggttaacatcctataatgccaaacctgttcttagccgaaagggactttaaggagagggactttactgagagggacctctaaccccctaaatcttaaaagggactctaatcctcctaagttgggcctctaacccagtgtcagtcaagcatccttgccttttattgagaggaagctttaaccctctcttacgagagactctaactcccctaagttgagctataaccaatcccatcctttgcctgagtaccccaccacttacccaaagttgtccaattagtaatgctgcagtctatttcctttgtgctgggggtctcctcagtatcatcccttcgagtttcaccagaaagatgttatcaggccccaccacttacccaaagttagcctttggattgggggtttctgcattatagtcacttcagtggttgccaaaaagatgttataggacccccaacacttacccaaaattaacctttgggtcaggtatttctgcactatagtcccttctgtgataatcagaaagatgttataggaaaaggatcctgatccaggcccccaggagagggttcttggatcttgtgcaagaaagaattcagggcgagtccgcagtgcaaagcaaaaccaagtttattaggaaagtaaaggagtaacagaatggctactccatagacagagtaaccccaagggctgctggttgcccatttttgtgtttttttcttgatgatatactaaacaaggggtggattgttcatgccttcccattttagaccatatagggtaacttcctgacattgccatggcatttgtaaactgtcatggtgctgatgggaatgtagcagtgaggatggccacactaatgtgttttaagccttttcctcagccaaactacaaaaaagcaaaaattactttgtttcaatattacccctactggctaacacactagcaggtcatcagaatatttgccattcctacaaaattccaagattctgtgatgatcctttgagtataagaatcacagagatacacacaattgttacatgctctatttaagttttctatgttatattttctctttataccccccaccccatttcctgactctttctttttaaagggtctttgggatcatgaaagcaaaatgcagcatcctcagtgtcacacacgtccatgtgaagagaccaccaaacaggctttgtgtgagcaataaagctttttaataacctgggtgcgggcaggctgagtctgaaaagagagtcagcaaagggagataggggtggggcagttttataggatttgggtaggtagtggaaaattactgtcaaagggggttgttctctggcgggcaggggtggaggacacaaggtgctcagtgggggagcttctgagccaggagaatgaatttcacaaatgtcatcagctaaggcaggaaccagccattttcacttattttgtgattcttcagttgcttcaggccatctggatgtatacatgcaggcttgggctcagaggcctgacattcctgtctttttatattaataagaaaaataaaacaaaatagtgttgaagtgttggggcggtgaaaaattttttggggggtggtatggagagttactgggtgatgtttcttagggttgctttgagtgggattaggggtggcgtgggaacctagagtgggagagataaagctgaaggaagattttgtggtaaggggtgatattgtggatttgttagaaggaatatttgtcacatagaatgattggtgatggcctggatacagttttgtatgaattgagaaactaaacagaagacacaaggtcccaataacagaaggagaaaaacaggtattaaaggactaagaattgggaggactcaggacatccaatcagagtgcctaagggggttcagcgtgattattttcttggttgatgagtttttgggctctatccttgagtttttttatgttgtcatataccaagccagattgatttaggtaaaaacaacacttttcatttaaaaatacacacagtcccctttttttgagcagtaagtcaaggcctcagtgattttggaggaaagagaaatgcaaagccagcaatcattttttaaagaaggattagaaacagctaggagagagtgaatgagattgatagtgtggtggagatagctggggagaggtagagggtcgcataagaacaggaatgagaataagagtgaatataaaggtaaagaataggactttattagggtgaaagtattggagtgtaccttgtcactgaagatcttctatccacttcaagagagacttaaggaaggtggtttgaggtaaaaccaggagatatgagttatgatggtttggaggaaaagtgtaaactggcagtgtaaacaagggcagggcatttacgagtagttgagaatggtgaataggagtatgactagacagaagatagtagggatgacaagttttggggttgcagtccaagtagtgggggtgactgcataaagccttgttgcaataagtagggtaataaacttaatagaatgaaaggatgttttaggctcataagggttactactgttcttcagaaatgtgagtgagtttaagggaagtagggttgagtacttgcaacttctaggaggaagaggagagattaggctggctgtccaatggacacagctttattctggaatggtgagcctaatagggagggtcttacaggcggatggcagttggggtattatagatgactaagtagggtccggtctatcaaggttatagagtttgaggggtcagattcttaacaagaactgatcgtccatctagggtgtctttatatggctgggaatatggagtaggcaagaaaagattagcagcttggcaaatttcctgtcttgcctgctggaggaccagcagatagattcctagaggactggtgtctgagacgaggttggggccaagcaagaaagtgtgtctatataaaagtttaaatggactgtaccctctagcatctcaaggacaggctctaattctgagaaaggcaagaggtaaaagtactgtccaatcttttttaagttggaggctgagcttggtgagatgtgtctttaaaagaccattagtccattctacctctcctgaagattgagaatggtaaggggtatgaaggttccactgaataccaagagcctgagaaactgcttgggtgatttgactaataaaggccggtccattatcagactgtatagaggtgggaaggccaagcctaggaattatgtctgaaagaagggaagaaatgactatggtggccttctcagaccctgtgggaaagtcctctacccatccaatgaaagtgtctacccagaccaagaggtattttagtttcctgactcggggcatgtgagtaaagtcaatttgccagtcctgggcagggcaaattctcgagcttgatgtgtagggaagggagggggcctgaggaattcctgagtagtagtagtatagcagatgggacagagaagtgatttttttaggatagatttttacaaaggaaaggaaatgagaggttttaagaggcaggatagcagcttgcaacttacatggaaggggttacaaaatgacaacagaatagaataggcctgtgaggctggaaggagatattttccttgttccaagaaccatttgccttgtgtggaaagagattgataggtggaagtttcagtgggagagtaggtgggagtgacagatgagaaggagaaaaactggccatgagggacagaagttgggacactagctgcttctttagctaccttatcagcataagcactgtcctgagtgatgggatctgatgccttttgatggcccttggagtgaatgactccagcttcctttggaagtaaagtggccttgagaagagtttttattaaagaggcattaatgatggaggacacttgcatagcgaggaaacctcttttagcctacataacagcatggtggtgcaggatatggaaggcatatttagagtcagtataaatattgatgtgtagtccctttgcaagagtgagagcctgagttaaggcaatgagtttggcttgctgacaggtagtggaggtggacagagtggtaacatcaaggatagatgtggaagatactatagcatagcctgcctttgctaatgagtgacaattaggcctgatggaactgccatcaataaaccaagtgtgatcagggtgaggaacaggaaagaatgaaatatgggtaaatggagtgaatgtcaggtagatcagaaagatacagtcatgggggtcaggtgtggtatcaggaataatgtgggagccagcctaaaacagtaagatcaagttgcttggacagaaaggctacaggtcatggtcctggctcttgtgtaagaattctgaccgcacagccctgcacttcagctgtgtgtaatgaaaaagggttcagatgagttagggagagctagtgtgggagcagcttccagggctgttttaagaaatggaaaaaggagtggggaaaggatttaggatctatggggtcagctaggttttcttttgtgagtttatataatggtttagtcaggacagtaaagctaggtatttaaaggcaaaagtactgaaccatgctcaggaaagaaaggagttgttgctttgtcaagggggttggggtttgggagattagccagacacgatcagcagggagagcatgtgtgtttttatgaagaattatgtcaagatatataacggatgaggaagaaatttgggctttggaggcagatgtgcaatgtccttttgagaatagattgttggagcagcaggagggtgtcctgttgggaagatttgtaggaggggctataaagtagaaggtcatcaaaatatttaataaggtgagatgtagatggatggaaagagagtaaatcatgagaaagggcctgactgaagtaataggagctgtccctgaagccttgcagcagtacagcccaggtaagttgctgagactgatgggtgtcagggtcagtccaggtaaaagtaaagagggccttggaggaagggtgcaaaggaatagtaaagaaagcatatttgagatccagaacataataatgggttgtggaggggttgtgaagggaggtattaagaataagagagtatatgggtttggcaccatggggtggataggcaaacaatttggttgataaggtgcagatcctgaactaacctgtaagacttgtccggtttttggacaggtaaaatgggagaattgtaaggagagtttataggcttcagaagctcatgctgcagcaggcgagtgataacaggctttaacctttttaaagcatgttgtgggatgggatattggcattgagcggggtaagggtgattgtgttttaatgggatgctaaggggtgcatgatcggtccccaaggagggagtaaaggtgtcctatacttgtggattaaggtggggagatacaaggggaggatgcgaaggaggctttgaactggggaaaaggcggcaatgaggtgtggctgtagtccaggaatagccagggaagtagataatttggttaaaatgtcttggcctaataagagaactgggcaggtgggaataactgaaaaagagtgcataaaagaatgttgtccaagttggcaccagagtgggagagttttaaggggttttgaagcttggccgtcaatacccacaaccgttatgggggcaagggaaacaggcccttgaaaggaaggtaatgtggagtgggtagcctccatattgattaagaaggggatggacttaccttccactgtaagagttacctaaagtgtctgtgatggtccaggaggcttctgaggtgatcaggcagcgtcagtctccagctgctaagccaagcagatctgggaaagtgtcagtcagagagccttggaccagagctttaggggctgtaggagtagctgccaggtgagttggacaatcctatttccagtggggtcctgcatagatgggacatggcttacgaggaatcccaggctgcagcattccttggcccagtggccagatttccagcgtgtgaagcaagatcctgggggaggaggtctggaaggaatgcctgactgctgtggcttaggtgctatgaagttcttgtgtgctggagatgtggctggggtttctctcacagtggaggcaagtaattgcaactcttctctattattgtacaccttgcaggtgaggttgattaattcctgttgtggggtttgagggctggagtctaatttttggagctttttctaatgtcaggagctgactgggtgataaaatgcatattgagaatgagacggccttctgacccttctgggtctagctagggtggtaaagtgtctaagggttgttgccaaatgggccatgaactgggctgggtttttatatatgatgaaaaagagcctaaacactaactgatttgggagaggtcagctaaagaaaaaggagcattaaccttgactatgccttcagcttcagccacctctgtaagaggaaactgttgggtagatgggggagggctagccacagaacgcaactgtaagctggaccaggtgtgaggaggggaggtgatagaaggattatagggtgggagagcagaggctgaggaaaaattgggacctggctcagcctggtgaggagcagcctggggaggaggggagaggtcagatgggtctgtagaaaaggaggattcaaaggactcagagcttggggtggagactgaaggaagagacaggagagaaagaagaaagatttgggatgagtcacattgggagcagagattaggaaaagacttgttgcaggaagtcagggaccccaaatggagggaccggctgaagccatggcagaagaatgtggattgtgaagattttatggacatttattagttccccaaattaatacttttgtaatttcttatgcctgtctttattgcaatctctaaacataaattgtaaagatttcatggacacttatcacttccccaatcaatacccttgtgatttcctatgcctgtctttaatttaatctcaatcttgtcagttgaggaggatgtatattgtctcaggaccctgtaataattgcattaactacacaaattgtacagcatgtgtgtttgagcaatatgaaatgtgggcaccctgaaaaatgaacaggataacagcaattgttcagggaataagacagataaccttaaactctgactgccggtgagctgggcagaacagagccatacttctcttctttcaaaagcaaatgggagaaatatcgctgaattctttttctcagcatgggatatccctgagaaagagaatgcgcacctaggggtaggtctctgaactggcccccctggggcgtacctgtctcttatggttgagactgcaggggtgaaataaactccagtctcccatagcgctcccaggcttattagaaaaaggaaattcccacctaataaattttggtcagaccggttgatctcaaaaccctgtctcctgataagatattatcaatgacagtggtgccctaaacttcgttagcaattttaatttcaccttggtcctgtggtcctgtgatctcaccctgcctccacttgccttgtgatattctattaccctgttaagtacttgatgtctgtcacccacacctattcgcacactccctccccttctgaaaatccctaataaaaacttgctggtttttgtggcttgtggggcatcacagatcctaccgatgtgtgatgtctcccccagatgcccagctttaaaatttatctcttttgtactctgtccttttatttctcaagccagtcaatgcttagggaaatagaaaagaacctacgtgattatcagggcaggtcccccgatagggactgatgtgcaaaagaattcctggatatcaggcacctcagaccatttgcccattttacgacaagaattatctagatcttgtaggatggagaaatcgaaagtgctgttttctggctatttggaaccattgtcaagtttgtattggggtcaagtggtattgcagaagaaaataagatgtttaggttttaggtcaggtgtgagttgaagaggttttaagttattgagaacacagtctaagggtgaagatggaggaatggagggtggaagtttgcctatagtgaaggaggcaagccctgagaaaagagagggtagagacacggagagaaggggtggggggtacttgcctcccggggaggtggtgcttgccaccaaggtgaaggatcaaggcaggcatccccatggtgatcagacacctctgaaatgtgggtgaataatcaggcaggcatccccgcagtgattaaacactgagggaagactgtcttcccgagaccatgaccatcgtcagagttttgggttcacacataaaacatgtctcctctgtctctaccagaaaaggaaaggcactgaaattaagggaagggagagattgaagggtagcacagaaattgaaaggagaaagaggttgagggatagtgaaagaagttggagaagagagcaaaaagaggctgcttaccagatttaaaattggtgagatgttccttgggctggttggtctgaggaccagaggtcataggtggatctttctcacggagcaaagaacaggaggacaggggattgatctcccaagggaagtcccctgatctgagttatggcaccaaatgtcacgtgcatccgtgggaagagaccaccaaacaggctttgtgtgagcaataaagctttttaatcacctgggtgcaggcgggctgagtctgaaaagaaagtcagcaaagggagatagggatggggcagttttataggatttgggtaggtagtggaaaattacaatcaaagggagttgttctctggcaggcaggggtagtggtcacaaggtgctcagtgggggagcttctgagccaggagaaggaatttcacaaggtaatgtcatcagttaaggcaggaatcggccattttcacttcttttgtgattcttcagttgcttcaggccatctggatgtatatgtgcaggcttgggctcagaggcctgacactcagcagctactaccaccattggcaccactggcaccactgccaccaccccactgcaccccagttgcttcactctccatcacagaagccttttcagcaacagccaacatttgtaccctcaccaagccctctgattttcccaatcacaaggccttcactacaatattttcttcattcacaagtgtcacctattctccatccccaaggtaagtcaattctaattttcttgcaagggttgacagaggtaaaacctgtccagataccccaaaggtgtttcatcttggcaattcttgactctttcaaggaaataagaatagtcaaatataactaagtaaaataaataagaatatataaggtctgtaaaccaaaaatgaaattctaagccccccaaccaactgaatggacccctcctctcagccaagggcattctaaagttaacctgaaagactaattcaggccatgatggaagtgggtggtcaggcatgcctcattatatcctcctccctttggaatttagacacaaatgaccaacattaacattaaaacagagaccttaagattgacaaagtagactctttgtagcaataagatatgaacacaacagatagcaggccccaaaatatatttattcaacatatttttaaatggccctgcaaagctgtctcttgtggggaaacctacattctgtagagaatgcccttccctttccagatcttttcgcttatccaggagagaattaactaagagtctggtacctttttaagtctgataagaaacatttacaatctattctctctgaagcctcctacctggaggcttcatctgcataagagccttagtctcagaagccccttatgttaatgcagatactcccttctattgatttcaagactttaatcagaaaacctctgagtcttcctatgacctggaagcccccacttagagttgtcccacattttcagacccaaccaatgtacatcttacatgcattgattgatgtcttatgtttccctaaaatgtataaaaccaagctgtagcctgactactttgggtacatgttctcaggtctcttggagctgtgtcatgagctattggtcactcatatttacttggctcagaataaatctcttcaaatattttatagagtttgactctctgttgacaagtcctagttttaaaacagtttttatttcatttatttattttgagatggggtcttccctctgtcacccatgttggagtgcagtggcacaatctcagctcactgtaacctctgcctcccaggctcaggtcatcctgccacctcagtctcccaagtagttagaaccacatacgtgtgccaccatgtccagctaattttttgtatttttgatagagatggggtttctccattttgcccaggctggtctcaaactctctaagctcaggcaatccacctgcctcagcctcccaaaatgctgggactacaggcatgacccacagcgcccaaccaaaatgacttgtttttagacaagaggttagaaattttttttcctcaaagggccagacaataagtagattaggccagggtttctcaacctcaacagtattcacattttgggccagataattctttgttgtggagtgctttccttttcactgtagggtatttaactgcatccctgacttctactccctaggtgccaataacatcttattctcagttgtgacaataaaaacattttccagacatttctagatgtcccataggaggtaaaattgccctgaggtgagaataactggtatagactttgcattccatatgctatctgtcacaactactcagcagtgccattatagcacaaaagcagccatagacaatatgaaaatgaatggacatggtactttcccaataagtactatggaaactgaaatttaaatttcatataattttcacatgtaataaaatattcctttaaaaatttaagcatttagagatggaaaacccattgttagcttgtgggacaaacaaaaacaggtggtaagccatagctttccaactcctatttgttttatttttgaaagtttaataatatatgtaatttaaactactgtatccaaataatattattttaacatgtggtaattataaaaatcaattcataaattcagtatgtattttacatttataatacatctcaatttgtactagccacattttaagtactcaatagtcatatatggctagtagctaccatattgggccatgatgccctagagtatttgcttttaattattaggcatacttcctctcaagaggccctagtcattgggaacatgaggtcactttctctttgaaggtaaaagcctctaagtcctgttattgatctaaactcacacaaaaaaaaaaaaaactgaaagtaaggtttaaaagaccaccatgacaatatttatccaatttgtgactgtatttctgattggcaattcaaaattttgtttggcttagtaatttttcttgctatcttgaatagaattaatcccagaaggtctggtagacaatgagtgttttggtgtaactgggtttctttatgtacaaagctacagaattccccttgaagacactggccttgacatccctgaaatagcaaaatagacttttttgtttactccacgtgtagtatatgacagttagtgcattgtagatagggccatctattgaaatctacatgtgattatactctatcgaacatctactttaaaacagcaaacatgagagcctacaattgacatctcactgtttaaaaaaaacaatttcacatatatattcacaaacatactaaagtggtcaatattcaaagtaaagactcagatattcctcactttgcaccatggtttagttaaataatacaagtaccccaacaacacagtttaaatttcagttaccatggtatattgactgtgatattaaataaagtacaaatttcactgctaggttttcagtatgtaaattactatataactaacagatgtgcatcatgatcaattatgaatcacatcacttctttcacagtctttggtgactggtcacttatcagctattcagtacatgtgcagagaacaaaccatgtgtttgtgttgcctctttgtctgccagtgataaacccaagtgacatttaacaaaaacatataatgaaagagggaattggccaataaaaatgaaagctcaagaaagaaactaaagtcacaatgctggaaatgaaattcaaatcaaaggtaaatgaagttatagaggaaacagctgactgtgggaatgttgacactttcactggttggaaaggctatatagatatgaagccaaaggaacttagttaaagcagacattgacataaatgaggaatttggttgtgacaagcaatgcctattttagaccaatggcttgtatcctcattagggactgtcagtataccaaaagaatgggtgttaagtctaggaaaattataatcatcattaagttgacttttagttcccaagatttcctataattactgttttcagtatttagatattactgctaatggtaaaatggcctatgagtagaaaatatgaaatttacatttctctttatccaaatttcctagtggaaccctgcccctaacaatgtttaccacttcttactgtccattttcacagatatgggggacatgattacatgccctcaacccatatgttttctaggtaactctaccacagaataaagcggtactcaaattactctcagcttgcttaatatccactttaggacactgaaaaacaaacacaaagggactaaacaagatgaacagtacgtatcccatttcttttaagtccactatcttgatatcatgaggccccctcactggttttatgtagatgggctactggaatgcataagctagtgccaattcttattttccaaagatgttaaaagattaacataggatgggaggagagtgaggatcaaaaaatctacctatcaggtactatgctcactaccagtgtaatgaaatcatttgtacatcaaagcccatgacacacaatttacccatggaaatttacccattggcttttgctgcaaaagtaccccttgaacctaaaataaaagttggaagaaaaaaacttaacatagcaaattcttagacattgttctgacttgtttgcaagacctatgctttcttcctaagctggtgctggatagttcttttgacttttttcattattgatcttctctctccctagcattgccaccaagggaaactatttcatgtaagacattcttttccatccagccatctggttggccctaatttctctgagcacatctttcccacctgtattgtgaaccatagagcaggcctaagggaaggttataaagaaggtaaggttggtctgtattgtctcagtctcttttaatatctattcccttctgtatggtactccttcttctcagagactcctgttctctagcttcttcataatcggctttcaaaataggatctgctgtcagcgatttatccctttagtgctaggatggtaaataaattttatcttgcatgccaactctaaattattagtagcagccacctgaaatgctacgtgaaggattctggggatgcatccagttgaattagttatgagaagaaaaattggctactataggaaagagaatcaacaattcaatggattaaacaaaaagagtgttaattatttcttacatgacagtatcaatgtaaaaagttcaaatcagagagggaattctgtttcttagtcattcagggacttgatttccttccaagtcattgtactttcatctcatagggaatcactcccatctgtatactgaaactgggtagccattacatctgagttgcagctggtgggagaaagtatggaaaggagagcataccctatgtcttaggacccaggcatggaaatggcatacatcacttctactcacattttattgatcataacaatcatttggctgcacagaactgcaaaagaagctgaaaaatgtaccctagctgggcagccacacatcaagcaagaatgggagaatgtattttggtgggcaacgagcatttttgtcccttactaggcttaacaggaatcaatgctatgattaattaatgaaattttccacgagttggaaaaaaactgtggcatccacccatattatggtattagctgatcttgccttaagtgtgaaatggaagtcttgttttctttcctagagggtcctgaagtttaaatataattccaaaaaatttgacaggcattttccactatgagaaaggtacttttgttaggtacaaaaataaacttgtccctgctttatcacttaatgtagaatcaaagattcgtctccagataacagaatttcagacatcagctaccaaggagggaaaatataggcttgggaaagaaggccttcttgtatgaaatcacaccacacaggcactagacagctctacttatataaagtttagctctataaaaatgagattggggtgtttcagagattttattaggaaatgtacagagaaaacagttgatggggcaaaagctataaacactaaggtgagaaggaatcagaatataggcaagagttatagaagcatctaaatggcatttgtatctgtttaatcagcctatcaggtaaatctgcccacttttctccctaccagtgaacatctgttttgaacctctaggatatgggacctcttgcttgataccagtctttctgtgcctacctattctaaagcctgatgtcatcttctgtgccttcccttataggcttacttccttcaacgctgaccattcctccagcatttcttattctaaagaggaacaggtaagaaacttcgttggagggaaaattaagcaaggattggcattagagagggagctgtgcacagtccctgtctcaacaaaaatagcttaagatgagacaagtactttacttagcataatcttgctactgaaggggctattctaaatgtccccccgcccaacaccattatgtaaacattctctaatattcgctacttaatttagattatccacccttccttctggccattgcattccttatctagcaatgcaggaaaagggcaagaaatcaaagggaaggaataaagggacttctgtttccagactgtattttaaagggaagtcatggttggttagcgattttctttagcttttgctttgcgtttgcagaatagctaatattattgttttacctatgggaactggtatccaatctagtgcccaatggggctgttgttactagagctattttctgtgaacctcatagcagactctcttctgctgaaaatgagatttactattcattctgggttctctcaaaagccagcctgccatctacaattagcggtcacatccatttggctatagttcaggtaagtccaattcttcatgtcctgcttctcagctctctgctgctcagagccaaaaaccttatcttagaaccccaaaatacatgtctagttgctgtatcaaagaccaggtagcagcctttacagaaagtcccttttctcagaatctagttgagccaatactatgcagtgtccactatattcttcttggttcattctctttcttttggaggcaacagcttactatggtgaggacaactggaatccatctctacctattcaccactttttaagtagtaaaattggtagctcaaaagtaactttattccctgctaagtcttgctctttccaattattattcaaacatgagaggtgacagtgagaagattggtttggcattataggatggtaccatgcaaggtactctaacaaccggccttctgtctcatggtctatctccctgcagattcaggttgcatcagctgtcctcctatgtccacaatccaaatgctatgggatactatggcagacaagttttccagttcttcaggaagtagcaactgtgagtattctagctcacaatgggaggagcacaacgactggactccagccatgagcaaatacaagtaaaggtttaactgagactgtctgctccccagttctccaacccctgcctaccccaagcccctttttgtcttgatttatagtagaaaagtaatagtcggtcgggcgcgggggctcacacctgtaatcccaccactttggaaggacgaggcaggtggatcacccgaggtcaggaattctagaccagcctggccaacatggtgaaaccccatctctactaaaaatacaagaaaaaaattagctgggtgtggtggcaggctcctgtattcccagctactcagggggccaaggcaggagaatcatttgaacccaggaggcagaggttgcagtgagctgagattgcgccatcacactccagcctgggcaacaagggcgagacgtcatttcaaaaaaaaagaaaaagaaaagtaatagtcacaaaatggatataaaaagagaggtaacaatgggaaactacaggggggcaaattaatacttttatagtttcagcagacctgtagtaacagaagaaaaactgattttcacttggttcagactatctccctgggctagaaagtatagggccaaggtagaggaatcggaggtagatgaattatcttcctgtgtcttcctttaagtagttcacattgctcccatttaggtaccagttaatagtcataattactataatccctctctttggatattctctaagactttatttcctcgtgagcataaagacataaaatagtacactggaggttagctatgattaggaagagccattctaactgtaaattactcataatccaagctctttcctgatgagcatgtatccgttataaaagaggctatgataatatacagtgagaaaagaatttgtttagaaattaagtgaatttggatctagggtcacctcagctattttgcgctgcgacattgatcaagttattttctctgggtttcagatgcctcatctttattttgtgcatttagatacacaattctaattggcccaatgggaattacacagctaacaccatcatgcagcaaaacaaaataaaatacagtggaactgaagtgagggagtaaaaccaccacactatgcagatgagactatctgcctagtaacaagacatttcttggactctggtacttcagccaaatgtcctctgggagtggagaggcggggagacaatatagtccactgccagaaagaacccacatctgttccaccactctcattgtcattgcgtttcctgggatactttcagaataattcattagtaacaacaacaacaacaacaaaaaaaaaaaacagcaaggaaaaggctacaaggggaagggtttttctaggtctttgggatatatctaatcatttcttcacggaatattataaagtagggtccactcaaagctcatccctcacaagccactcaacctttgacattcttcttctatttaatgtgagtcagaattcctaagattttttgaaatcctgcctgcaaagtctgcttatgaatttttttccttaccacggagttcccataaagtgacaggttctgcctaagtagttagctacctgcaaggctgctcgaatccaactttctttcccactctactttgcattctgctctccctttgctctcctctccttaggccctcaagtgatgccagcttttgttctagcactctagaaaggagttactattttgatccagagtacacagagaagagaaactggagtgggtaaaaggaagctcgtcactgagaatgctggtactgggagcaagactgtggcaaacccaggaaatactaacaataagaacccctcaaaagttcacctttaccaagccaatggaaacaatatagctgagtggggtttgaattttgagaactaatgactcctcagctaccatgtaattgccttggtgctccatttgctataattcatgggaaaggtactaaggtccttcaactggttttccttgctacctccacctttttcagaagttggacctatgattagcacacttcctgcctatccattcacagtgaatagaatggctggctaaattttaaaccccatttaaattattccacttcgaaatttgaatgatagatgcttgcctaagtctactggcctcagtaacattaccttttctcatgaccaagggtaaaagagtaaattgataggaggcacaagtttttgtggatgtgggttgggctggcaccaaatccaactacaagcatacagtgaccacttcatacacaccacataaaaaatacaaaaactgaaaaatactatcaaatgctttgacattttctaaatatttctgctgcccctataaaattgccttgtctgacctttcctcactaaccaggagatacggtgtttttcatttcctctcccttcaaattttacaagagaatcaaggaatttgaggaccaaagcaccacaaacacaagagtaagcacagcaaatatgacaaggggactgaagtaagcccctatgggaataggatctgctgaaggaatcaagagggatggacaaaggaacagaagacactcaagaataacttcaggaagtctccttaccgcctcacctgctttccctctgtcctacacatccagccttgcaaagaaataagagtaaagagaaaagtccatgtagcaccatcccagttcagaagcaacccccaagatatgggtcaactttatcacctcaaactctactcatttataatgacaaaattcaactgttaacacataggtaagagttcttcaggcatcggttttaaaggtccatgtactgggacgggtgcggcggctcacacctgtaatcctagcaccttgggaggccaaggctggtggatcacctgaggtcaggagttcaagactagcctggccaacatggtgaaacccagtctctactaaaatacaaaagttagccgggcatgatggcgggtgcctgtaatgccagctgttctggaggctgggacgggagaatcacttgaacctgggagacagtggctgcagtgagccgagatcacaccactgcactccagcctgggtggctgagcaagacactgtctaaaaaaaaaaaaaaaaaagttcatatactgaataaccatctgggcccataacagcttaagactttctggagaaaaaaaaaaaaaccagtttccagtttaatttccaacaaagcagtaggaactcttgcctatagaatactgtgctgggggctgggcacggcgacttatgcccgtaatcccagcactttgggaggccgaggcgggtggatcatttgaggtcaggagttaagagactagcctggccaaaatggtgaaaccctctctctactaaattaaatacaaaaattagcctgctgtcgtactacacgcctttaatcccagctattcgggaggctgaggcacaattgcttgaacctgggtggcagaggttgcagtgagccgatcacaccaccgcactccagcctggagacagagcgagactctgtctcaaaaaaaaaaaaaatactgtgctggttcatttgcctataaagtcaccaatctaatgtttgggtatttgatcattcagaattctagaaacactgaagatcccttcacctactcagggtctgggcctctttcatgaatgcttaattcccacagccttacagtttatacccttctcctctcccacttttgatcctcaagttttttgcttctcacattttttactgggtttgtgcttctcagtatccttgaccaaagcaactgatgctgtaagaaatgagacttcaaaccatttacccacactgggtgattaaggtagtttaaaaaaagaaatgaggccaggcacggtggctcccgcctgtaatcccagaactttgggaggccgaggcaggtgtttcactttaagtcaggagttcgtgaccagcctggccaacatggcaaaaccccgtctctactaaaaatacaaccattagccaggcatggtggctcatgactgtaatcccagctactggtgaggctgaggcaggagaatcgcttgaacccaggaggcagaggttacagtgagccaagatggcaccactgcactccagcctgggcaacaaagcgagactccatctccaaaaaataaattaatttattaatttaaaaagaaaaagaaaaaagaaatgaagaacttacggtaattagtgtggttagggacagtgagttagaaattgtcacatcaaaatacaaagttttcaaaacagtatattttattttacaatagcaaccaactccccagtttgtttcaattgtgacatctagatggcttaagattactttctggtggtcacccatgctgaacaatatttttcaatcttccaaacagcaaagactcaaaagagattctgcatttcacatcagttcacaagttcaagagtcttccatttatcttagcttttggaataaattatctttgaggtagaaggacaatgacgaagccacttaattccttgtgtctgcataaaagcagatttattcatcacaacttcatttatgtgaataaagcagatgatgataaaatgttctcttattcttgtttaatcagtagtggtagtgatgccagaaactgtgaaaggaaggcttttagttactttcttctttccattttccaataatccattccccatccccagctgaagaaaggggtgttactgagtccagctgataccacacattgaaaggtaaacattaatatttcaaatctgatgtctaactaaaaatgtacagaatgaaaactagaaaatttcaaccccagattatcttcaaccttgctccctccaccaatcatactttgacatttatctatttccttctccacttatggatgtaattggcttgctatagaaactacagttcagatgctttgaatgtatgaactacaatgaacaataaagtcctcttcttttgaagcatattttggcttcagctttaagataatcttatgacaagaagggtcacactgattcacttaataaattccattcttacctaacacaaggtttagttgataagcacttggacaaaaataatacttttcaaaaatgtaaagcaaactagtgaggacaaaggattttgtcctcatctcaacaatgatcagctattggaactgcatgaaactgaacaatttaaacctggagctggtaatgttcttaagaccaattcagaacaaaggcaggttgcccttaaaacaggtttgaccttttccttcactcttcctcctgtcccaccctctgtgagtgatttaaaaacggaaaaggtcaaagcccagccaggcctacatttagagaaattttaaaaaaatttttcctttcaattttggccaattatttccaatttttattttattcttaaaacttaagcatggtaaaatgttaagctgttttcatccactgatattattctactataaaaagcccttcttgagcagatttgatgataaaaaggagaacatttctaaggtataattagagaagctgttgcatgagaaatcatgtctccatctccattttgctatgcgttatctgaggattgtttctgaaagagatctatttaggcagtgtatgtatgtgtcagcatgtaaaaagtaaagaactgaaaatagacaaaccttgtaaatgcacttcaaaaccaattgtggctcaagtgtaggtggttccccaaggctggtaccaatgagactggggtttgggaattagttggtcatcatccctcctgctgcccagcagtggtcagtcatttttcatgagggatggactaggaaaatgaagtgtctattataaggagagttcctgtaacttaaggagcaagctcactacaaaacccagctacctgcttatcgtagtggccagagtggtagaagagatacggagtaggaattaaaccacacaatgttatttagggactaagccatgcccctaacaagaaaacaagccaaaaggaaagtattaggcattctctgggaaggcatgcatttttttcccatgtctctggggccaaaaaccttataccaagtacctattggcacccgaatatatttgtagaatgaatgaatacatgaaaaaaaataaacagtaacctttctcctatattctactttccaagccaattaataagcaagtgtcttttcgtcatgattttttttgttttctgtttaggatttaacaaaatggttgagataacagtcacttctgtttgatgaagagtatcacttcattccatttttgtgtttttgttgcatctccaagtcagaataaatgccttttggagcagatatatttcatttagcatttagtatcatcttcatcaatactcgtatgaacgaaaaaataaaaagccctctcttattcccactctacaacgcatgtcaaaggtgatctgtttagtttttccttagtatcgaacatatcacagctactcaatgaagtttcttctcaactaaagaaacacagtctcttagagaatttgttcctgtgtttccaccataagataaatgagataaagtgcactttggtttacgtctttcaagcacttaagaacagcactttattcagttttaataaatttttactaaattggtaaatgcaaaagaatcttttttttattgctcatatgtcttcctgtctctaagccagaccaatgagcaaatacctttaaaactagttgttacatcttgaaccatttaactgtaataaaagcagaatgtttagttaatgaattaaagaacaaaccctgagcccttttatcagtctcctggctttaaactaagccaatgaggaagtgatttgggggattcctgaaactaggaaaaatgtctctttattttgaaagaaacttgcatttttctttctttttttttttttttttaatctcaaaggcaattgagtgggtcttctgggccagacctatttaatttacgaaacatagtaccttgcagagaataggcattgaaatattatttaaacaatcaaaccaaagatgttcttctatcttcagctgtcagtgatctaatgccctcatctctcttatcctcaggacccagaatggtatattccacataaaagatgctttgtttatcaaatgaatcaaaaagcacgcctgaggcatttatttttactcctttacttctgtaggccaggtcaaggtgggtctaattcacttttatcatcagcacttaagaaactggatggaagaccacaacaccttgttttttgcaaaaattttccatctcctcaatcaggccaggaagcatgtatcttctggacaggactttatctctctactcagcttagtacactgccttatattagtccatttgtcccatgttttcatcactgaataaacttgttaaatgacttttggtctggatctcacacctatattacttcatttccttctgtgagcactctataatgataacatcatttttatatcctagggcatgtagttccgagccccacagaaagtaatcaccattcagtaagccaatagttcattcctatctgtatagaactgtaggctttgtaaatctacacatagatctctgttgtaggttcaataatgataataaatgtttgtgcccccagttgttatctctaaggataagagtaatcaatgatcattcagcagatatagcttatatatgggtggcagtttacaaattataaattgattttacacatattttcttctgctacccaagacacaataaagatggtttatctttgcatccccaatgcctagcaatgagattggcacacaatagataactactatagtggcattcttcagacaaccaatcccttgcgtatgcgtattcaaaagataatcattgttattcaaattttcctactttatttgcacaatataataactatcatacaattttataaacctagtacccagcaccaagtgagaaaatcaacagttacatttatatggtgccttagagttcacaaaatgctaacataggtattgccttatttttggctgtggctaaatgaaatatgataaattttcagtgcctttaacagtgagttcacatagtaggcaatcaaaattgatctatttaacaggtatttaaacccttggtttgtataactacttatagaacccttctcactgtggtttaactatacaatgagaattttgtagagacaatacctagcttacagaaagttttattcatacagaaagcatcaaatttttcatttacaagtgctttataatttagaaagcacattcgcaagctgaattaagtgactttcggtctggatctcacatctattacttcatttcctcatactagctctttcctggttacctggaaaaatgtatcagtaataatttaacttaacctcaccagtaaagtcttgattgtttaaaattaagcaatatatcattccttacatctgaatagtatagaggataaactttcctcttattacataggagaattaatcttgtattttacagtacccaaaatagctggtatgtaagaggcacttaatattcattcatccattcattcattcataaatatgtagcccattgacatttgtatcatgctttagtttacaaagcactttaatatgcacctttctgaaattttttgttctatgagaatacttttccccctttggtagctctagcacccagcatggtatctggcacattataggtgaccacaacaagcttagtcccttatgttttcagtatattttaaagtttaaaagcagtttccatgtgttttcgtttctgatacctggaatactgcatttttactcaaaattaccagagcagcaaacacaaattggcctcaaatatacatataatttattcatttatcaaacaattccttgtgtctgcatagtactatatccttttgaaagagcacttttttatgcttgctcctttctttgtatccacaacgcttatcacagtagaatacaagtgctttacagtttacaaagcacattcactattttttttcaggtcacctagatatcaataatcattgcatttttagtgcctagcacagggacaggcacagaaaaggaaactagtagtattcagaaattttctctgaataacaaataatacatcagggggtggtaagctatgaacagcaggccaaatccaattggctcaaaaactaagaatgattttgaccttataaaaacgttgtttaaaaaacaaatatgtaacagaaaccatatggcccacagtctaaagtatttatgatttgaccccttacagaaaaactgtggacccctgatttacataatgcttcacaatttacactgcactttcaaatgttaactgcatgattgccaatacactaattggtttttctcttatgttttacagtgctttcatacacattatcagtcatttaaatcaacttcccacataaacaggaagaaaaaaatcaaggaaagtattaaacatgctcaacagtcccaggttctctcatctttaagcctagagatgggtattaaacccaggagtagcgttggcacagtccaccaaattatttggccactactatgagcagggagttcaggctgtccccttgggacctcgctttgtcccaggcacagtcaccctttccataaccatcactagaaatcccaaaccccagaatcctgctcacctaagctcaaagaaggaagctgttgctggcaggtgcttctcagaagtctggcacatctgtgtatttcttgtctaattcttctcattggcctggagcatctcttcacatttttctctagagagcctggcacttttttttccccaacaacctgaccattttatcttctcagtctagggcttctggggtcaaaagaaaggactgaaatacagtatcacctatatgaatgtctgctcctgagggaagttaacaaaagccagattagatactgactggattttggtgtctctctcaagtggagaagatgtgaatagaaacagaagtttacaaaacactatagcctaacaaataggtaaaagctgtgatttaaagctggctcaagactggcccaggcataatactgtcaatctaaaggtaaccggcaacatcaaaaagtacatctcaaaagaatcaggcttaaagataaacaggagaactggaaatatctaagagtaagaagtgtaaacaatagaaaagaggtagggtttagggttctcatcttgggatttccccaggtcttcaagcttctatccttcctgggttctgggtcatgggcctccagattccggccgttagtcttgagatacctttttcgcttgggtcctctatccatctaggtaggctttgtgacaggggccttccatccttgggttgtaggtcttccagctacaaccctgggctaatcttaggtcgttggccttgtgtcacaagtctcagttcttaggccttccatgtgtcctgtcccaggtcttaagacttctaactcaagccttgagacttccatccaactcaggccttcggtccaattcaggccaccctctgttttcttggctcttgaggcttttgttggtttcaggcctgaggcttctatctatcttggaacatgggctttccatcttagtcctcgggtctcaagtctcaaaccatctgtcttatactttgggccttctatccatatgagccttccaccttctgccctacttgagttctgggttttactgcagtctagggccttgttttggtcttggatcatctcacatggcagcctggcataaggaaccgctccacaatgcttgctctgatagccgacgttctgcacctatcaggcaggggttaggaagcccctctgccacacatgacacacacacacgtacacttgcccacatatgcaaagaaatatttaaggagagattacatgaaatcaaagagagggagatagattcatgaagaggctgaaatactcaaaggtgagtagaaagggaagaagcagagaacaaatacaagccaacagagattaatactgaaatagaaaatcacaaacagcaagagatgctgaggcacgcaggggaggagagagagaatagcccaagagaggcagaaaggaaatgcagaaatgagaaatgtgagataaaaagtagaaacagcagaaaggaggccagactcagaaaaaaggtgaaatttaaaacgaacgagaaggggaaggggtaacaaataatcacagttcacaaagagaaaagagaggtaggcagagaaaggagaggtagacagaacaagaaaaggacaaaaagcacacagcatgtgacccaaaaaggagacatgaaataaagcgtgaaagaagagccacatctaggagagcaaagagaaatagcaacaaaatgaaaaatgagagatatgtctaagacaagacacagaccactcttgtgaacaaaaagagaaaatgaggcaaaggcacacacgaaagaaattagcaagagaaacatggaaatgggtaagacacactttagatagagaacaaagagcaaagacaagaaagaaagagacaaagaaatacacacttgagtgcaagagataagcaaaggcagacattcagaggaagtaagtagtagaagaggcaagatacagtgaggggcacaagaggcatgaaaagcatcacagaaagataaaaaaaatcaaaaagtgtcattagtaattataataaactattgttactacgaatactacttatagtactacaataataacaaccaccaataccaacacagatgctcttctatttataaacttttaccttagggatttcttacatagaaccaaagcatgccaactctgcctgctacctgatagtgctagtggtcacttatattgtgggaaatgaacttatgagtcttcttgggttaccttttacttgacatgtgccaggcactgcaataggtgagcactttacatacatgatttcatttaaccctcacaaacagagaagtctagagactttaagttgtcaaaggtcatatacctaatgagtagcagaggatttaaaacacacaatgtatgcctcttaacatcctgttacaactatttactaggatttctggaagagccaaatgggatgtcacagatgactaagtattttcataaaaggctctttgataggacttgctcaatcccctcctttagcatcacctttccccaactctttagaaaactgacttcattctcacacttttataatggctacttcagagtttagttttctttttacactaatcttaactgacgacagagtctctcacaaacggagatgagaaagggttaccctttcagcagaaagcagaaatggtgttttaagcttctcaacgtttaaggctctaagaatgacagagggcctatacagtgaagacatagaacacacaagcaaaggctaaattcttctgtgatacaactggtaagaagaccataatgtctttgagttgcttcagtgaacccagtcagtaatatggaagactggtcatctttccatctcacatttagccccacttcacattagaccaacacaccccatccaacaccagctcccaaaaaacagctgttataacagttctgaagtgatcctcacaggactgcaacatcaacaacttacttcattcagctatcctcaagtgctagagtgccaggcatgttgatcttcaggtgggaaggctgacttccttcagtgtgttcaaatttcttggacctgctgaagactcagctctctgcactgcttgtaggaagtataatgatttggcagataggaacaatgaagagctataaaaaaacatgagataaaccatgtaaatgccataaatattgagtactgtgctagagttacataagattcaaattaataagcaatagaaaatgtttccacagaactttgaaacctataaagtcaaaacttttaggtctttagagagaaaatttcctcattcaacagaataggaaactggcataaatgggaaaatgtcttgccaaatatcacttgatgagtcactagagacaccactaccagtcatagccttataccttagttaaagaccagaactgccgggcgcggtggctcacgcccataatcccagcactttgggaggttgaggtgggcggatcacctgaggtcaggagtttgagaccagcctgaccaacatggagaaacaccgtctctattaaaaatacaaaattagccgggcgtggtggtgcatgactgtaatcccagctacttgggaggctgaggcaggagaatcgcttgaacccgggaggcagaggttgcagtgagctgagattgcaccattgcactccagcctgggcaacaagagcaaaactccatctcaaaaaaaaaaaaaaaaaaaaagacttccatcctgttttaagtgccaatcagctaggaaagagtccctttaaatgattaataactgagatcacaaaaataatagatatgagagggaaaaacataaggtcttcccaatgtttaaggctcacttcgatgttttaagacccctcaagtttgctttaagtctcctggctcaggactaacaaaacacagccttagagcagcattttcaaaactcacaatattgctctttgagataaaggtgagtcactctggaaggcaaatattctcacaataagaaaattcacataggttgtttaacattgcagctaaaatacaaaaaaaaagaagaagaagaagaagaaaaagaaaattcacatagactactggccctaggagaatttatctaaagattatgagtacaatagatagatcttcctagataactctcaacttagctttctagttcctagactttctaacaatttgttagtaactctctatttctaaatctacagagatttctagtcaattataacatttcaagagttcttacccatgaaaatatttcatgaaatttatagctacccactatttacgaagaatgctgggcaaagcctatacgttcaggatttattgcaccgaatggtcacctttatctgccaattctcactcgctaatcagcctctcccaacactgacctagagaatgtagggtcctggttctttagctcctgcctgatgacagataactttgtgccatttttagtcaggtttccatttgtatttatgcggcttccatcaatcagcaaccatagcataaaaagacacacctctcacttgttgtattatacaccatggcatcccaagccatcctgaagtatgtaaatgattggcaaagttcttctgtaaggctttaagagagactttggggaccacatggaacagaatgatttgcccatgtgatcaatgtcactgatgtgacagttgtccatgttctcctaaaagaacaacttagctgtaagcctctgccacgtgctatagtcccactccaaacacccgaacacatgcaacccgctaccctctttacatcatcactttaaccagttaatctcacacccagttgcttcccaggttagttaggaagctgtttttaccaaatcatatgcagaataatgatgaatacgacctcagtgaaacactaagtgcaatgtatactggaaaacaaaatcaaaattaagactacttattatgcttttagggacagcttacgcaccttgacgtgtggtggttgtttttgagactttatcttcctatctgggaccaggaaagtatcttgacagaacctcctgacctagggttgttgcccagtggtagtgagcttttcccctggaggatcctcatgccccatctccacctagggatcgtcaaagggaatggatcactaacactgtaaaacaacaagcctattcttctgaggaagatctgaaaagagataaaagaaaaagtattgaaatgcagtacactgggaaagtctgttctaatgggcaactagtggttgagttcaaccatatttttacccttttcttcatgtggattgaagagtggacatttacagttgtgcggagctgttatattctggctaccaacttagcaaaaaaaaaaaaaattatcctattcattccagctctattctgtatgctttccctcatttccaagagaaatttagaactgagtaattgccaatattcccatgctgcattttattctccagtctttattactgagcgatcctctacaatgtgggttgttaatacccttgtgttctcagcacaaaatatagtaggggggtcaagaaatcaagaggttgaaactaatggaaggagaaactaatgctttctcaaccaagagagccatgaagccacacagaaaaggtcggatgtggtctaaccctatgagttatgtaagaattctcctccacaatgcctctggcttcctttataaagagctattttaagaactgagaaatccacctctatcaaagtgcctgtcagctagttctgtagcatccccctcttttaatttgtactttaagtagtgccatgccataatattgccaagataaagagaattgtttcctactcaatccacatggtaacatttcttcaacaacctgtataatagggcgccaccaaagttctaggatattcggagaaaccaagaatggtcacaagcacatagaactccagttataacaacagctggccaggcgtggtggctcacgcctgtaatcccagcagtttgggaggtcgaggcgggtgaatcacctgaggtcaggagtttgagaccagcctgaccaacatggagaaaccccgtctctactaaaaatacaaaattagcctggcgtggtcgcgcatgcctgtaatctcagctactcgagaggctgaggcaggagaataacttgaacccaggagacagaggttgcagtgagctgagattgcgccattgcactccagcctgggcaacaagagcgaaactgcgaaaaaaaaaaaatacacgccacaaaaacagttaagcaaatctatgcagaaggaaaaacaaggtacagaaaaccagggattcagtaaattccttatacaggcccccggggctctcctattccactttttaacaatttcaattgtttttcaagctaagaaattttgatttcttaaaacaaggaaatggcagtgataatggaattaggcctaccaaaactgagctaatacagatgaagttagtcttatttgtaaacaaatcctgagaacttaatacccatctgccaaaggaaagtgggaataatttaaaaggccactaatcaaaaggtgttaagttcattaaatctatcttgctgtgtggtgagaaaagaaataatttagtgctttgcatctctcattcttcattggggatcaagtatgcttgcccttacagacctcactggagcccagctctgagggataaatgaaacaggccgaactcattatgtaaagttaaaatgtatgtgtacatgcaaaagaaaaagtataggaattgatgaaaactggctcacgttctgcttttctttctttttaagagactgggtcccgctctgccacctaggctggagtgcagtggctaatgatggctcactgcagccttgaactcctgggctcaagcaatcctgctgcctcagcctccagagtaggtaggactacaggcacgtaccaccatgcccaactaattttattttattgtagagacatgggtcttcaactcctggcctcaagtgatccccccacctcaacctcccaaagccctggaattacaagcaggagccaccatgcccagctgtgttctgctttaaaaaggagagttgtgggaagttcaatccaaagacagaagcactacaacaataaattccccaaactacctttttctccagatagctggcaacccatccaagtagattagctggagcttggccagattctcaaagggaaagatatgattaatttggagcctcttatagctgtttgcagtcctcaggtctcacatgctcagaatgtccttaagaagaaagacagggttcagtaggctaccaaagcaccggtaggataccaaaagagttacaaaaaccccaatgaaaaaaacctaggaagtataaactgaagcattagacataggtatctcctgtctctactttctagcctgcttggtctccctaaagtcctctaatgacaagccctggcagtacacgggaagattagacaagtgaagaaaaagaactacatgaaaatatgggtcaaaccaataccgaccttaagggctgacactaaatttgtggctaatggtcatcctgttgctgaaaatacttcaagattcaaggtggtgtggcaactgctactactgcttagaggtgcaattgtcttgactgtttttaataattggctatctacctttactatagcataggagctcactaaaggggatctaagccaaatttgcagtcttgaaagcactttgcatggtactgtatagtatggtgtgaaaagcacccagtatgttaaacctgagtaccttaaatgaatacaggcttccagatccctgatcagggattactgtatcatgaggaaacctttatgtcaatgtcaaacaggaatatatggaacatcacttattcaacactattctctagctttaaaaaggccaaactgttctatgatgttctcaatataagcagaacaagcttcaaaatctcttgccaacatccttccccatcctaatttaatctaagattagatacttgacttccaaatgcaggcttccagttaaacatggcggttcatacatgtttatgcatttactctactgcttcctaaaactccattaatgagagtaaatgtgcactccatatgcaagcaaatacacctaaagaaattttaaataaacggatcctagctcaaattcatttatacactggcatctaaaagggaacaactattccagtctccccaagtcttcttaagcatatttatggagtatcttgctttagcatcaaagccctctagttttgcctgttactatggtgatgacatactcaaagagcattccctttcccttaacgggaatctaaggctagagaaaatggttacattttggaactgggaatctaaggctagagaaagtggttacattttggaactgatacagaaccatacatttcactagggttcaatattcactgacaagaattttgagaatccgtcatcttgcagaccaacaaaatatcaaagtcttatggagagaataactgagtggcacagccagccatctggttcaaatactccagcatcagacagaattgtcacagctagacgtgatattaataatcacataggccaggcgcagtggctcatgcctgtaatcctagcactttgggaggccaaggcgagtggatcacctgaggtcagaagttcgagaccagcctggccaacacggcaaaactccatctgtactaaaaatacaaacattagctgggggcggggggtggggggcgggtgcctgtaatcccagctacttgggaggctgaggcaggagaattgcttgatcatgggggaaggaggttgcagtgagtcgagatcgtgctacttcactccagcctgggcgaaagagcaaaactccgtctcaaaaaaaaaaaaaaatcacataattcaacattttcattctctaaggaaactgggaacccagaagatgaaactacctcaatgttacacaaatagaaggtaaccaagtgatacttaaacccatgtcttcccacaattcaaaggtcttttaactgtggggtctgtgcatagattctcaggacatatggggagctttctacaaaactttcacaatactctcatttcactgtaaggatagtttagatcagctatatgactacttcataatataggaccacgttgccagattagtggcaaatgttctagttttgttgcctggggattacagaaaagaagagaagcaaacaatatataaatgtgttttgtgccaaatgaaagtgaaatagcattgctatgtgctataatggcaggatttaaagcagtttgaaaacagcagtttggtgaagtgcatcaacacagcatgtgatattacagacacgccactcaaaagaaactataatactataatagtagtgccatatttgcattttagttatctattaactactaatttgtacatctgctatgttttatagttgtattatagatgtaggcaaacagatttcattccaggtttgttcatacactttaacttaacaattattcccataaacctaaatagtacataataatatttttcttttacagaaaacgtttaatcaaatatagcaaaatattaattgtagaatctaagcagtgattatgtaggtgcacactgaataattcttttcttgagagaaaacctccctactatcaaacttattatacagacttgagaaacactgtctcaaactaatatctaatataaaatattaaaattatactcaacataatttcatgttattttaaattgctgattaatatgcaatgcacatgacaatgctgttaatcagggcactttttgtaacagcacaccaactttcttgactaaaattgaaaggttaaaaattatatttgggttacaattgccaaggaagacatctactccttgggtcttaaataggcactttggaaggctagctggaggtcagtaaatgaacctttcctatcccacgtgtgaacatgcctttcccttcctttcccacctccagtgttctcagggtcctttagctcttagaaaaaaacggaaagaagaaatgcatacccaaggaacagcttacctggcgatatcagaataatttaatctgaaaatcaatgtcaaaatgtggattgaagtaaattctggttcttaagataaagtttgtttctgcaacctattttacgtttcaaaactggcagaaacatttagggcagaagggtcatttctagtttcaagaataccctacagctaaactctccctaaacttaaccatagaagcaaatgtcaaacactcactaccgtaatattaacagaaaaatttcccaaccaagccaggtttctcactgtagaaatgggaggtaacagataagcaaggaggtgagactataatgatccatgtggcaatgattagagttggagacgtaggtataaacacatttagtttaatatagatacagatggttatatatatttatagctatgtgcatatacacacgttagaatgcaaatatatatctccttgctcttgtcaactgaaaaggtcttgaaggaatgacactccagtagtaatgagcgcacctagcattcacttcttgatttctaatattactctccaataaaaagtatcaaggctccttgcagaaatacatcattttaggtccaggcaggagatatgcaaatgagtctgaagcatgttgtagttccaaaaataagaaagtgctcaaacaaaaaacccacattcatggggttatatcaaagccaaatgaaagacctcccaatggccaaagctggaacaatttgaacaacagaataaagtaatactgtattataacccagagtataaaatatccctgagatcatactgatataaatgactgaataaacacaatacattgtggagaaaagacatcctgtgcaaaagaattccaaataatttatgtaaatactctgccctcaatgaggtggaaggtaatttcccattccttaagtgctggctgcacatagtgacttcctatgtgaacagtatagtagggaaatggagaaataaagactaattttacgctggagaaacctgacaaatagtacctcagacaggtgattaaggataacataaacagtgataagtcatgttgatagtatgtactcttgataagtgataagaatggcactctacctttgtggtcttcctcctaaacactcataaacccaatctagtcatgagaagaacatcagacaaattccaatagagagacattctatagaatactggaccattagtcctcaaaactgtgaagttcatcaaaaacaaagagtctgagaaactgtcattaccaagaggagcctaaggagacatgactactaaggacacatgcagcgtggtatcttcaatgggatcctggaacacaaaaagaacattaaggaaaaactaaggaaatctgaataaaatatggactctagttaataataatgtatcaatattggtttgttgtgacaaatgtaccaaactaatgtaaaatgttaacactgggaaaaactgggtgtgaagtacacagaaactctatcttcagaatcattctgtaaatctctacactgttctaacattaaaaggttattttttctaaaaatctcccaaccagttgctgaagacttataagacacagtttttaaaaagcaagcaaaatggaacctaagaactggtaagtctatgttccagatttttctacagtacgtaccatcattgtttgcagatctgatctaaagacttactctctttcttttctgtttatatggatttataataggtaattttgatgttaaaatatacaaggcccaaataaccaggtatccgtaatatcaaaaagttattttttaaaaaaacattagcaattaaactttgtttttgtacatcaacagatttcctggaaagacctagtcaatctgctgtaaaaaataagtcgtaagttagtagctaattttcagtcaagggagatctataaggctggaaaactttaataacatatagattgtagagtgattatatcccatcactgttcaatgccaatcacactaacagcatactataaaatatactatgccactagttttcaaagctatgggtaaagtaacatagataattttataatgggacctggtaaagtacagtgatgttccagtcatatccctatttttaaattcttatacgcacttgattatgtaataagagggtattgcttgggtctactgcataacctctcatgtttccgggaacactagaagactagcattctaattggttaaggaaaataatactttaagtctacccataatttaagaagtctagcaccggtcaaatttacattttgtttcagtttctcatcctaacatgaaaaaaaataatcaaaagttatttctaatataaacatcaaaacagtaaaggagaggcttctttaccaaactcatttgtataagatgcagaagaagcccaagctccatgtatcagtactcaatttggaaaggtcaaggaagagctatcaagtaaagcctaagtcaccaacaaaaacatgaccaactcgacagcctaatacacatatatatagtgatatataactgtacatggccactgaagtttaacttgttaaattcagcaggccagctatgtcttaaatacatgagctccaacttgagttggatttttgaaggaaacctgtgtaaaatgctacttgcctacagcccaaaatatggtagtgagaatatcaattttctcccaatccagtctttaagacaaggcagaggaaggcattagctctgtttaactgacacatcattactctttgccatccaaactgataaggtttgggggaagagaagaggcattagctcagttcagatataatcattagtttctttctctttaagctggtaacgtatttttccaggatgctttcacatataagaatattttagcagtcaacaaaggtcaactcttaattcattactttaagacatgaactcccttcaagctgtacatttgataatcagggcacaaacaccctgaaaagaaattatgaatgcctaatcacagcagccctgggtctcacagtcttctgtaatttagggaggtggctagagaaatggaagttacagaaagataaagctgaaagaggatatgagaaaatggtcagaaaacttcctccaatcctacatgttaaggttttataaagggaaaagtcagaaaagaaatgacaataatcatttaaagaaatgccaaaaaagtttccttcattagacttttgaaaattttccaaatcacaaaatgtcattttcagggatttaggtatttgatataagcccctatcttatttcactagcagtctcgagatggtcagattgatggtgatctgaaccaaactcagagccaggactaaagtctaagcatttctgcccaaaaccataatgatttccttctgcatcctccataagaaagcaaattccttgatataaatcctgtctttggttttgctatttattccagcacctggtacaataatatttgttgaactaacacaagaattatctctattttgaagatgcccacatttccagagcatccctttttacaattgctagagatttttcttaagggtggaaattatttcaagcaatgaatttaaatacagcttcaagattcacctttggatgctatctagtataatcaatccacctaaaatcaagccatccttcctcttgacttaaggtacagaatcacctccaaattcattcatttaaaacaaattccaataataattataattgtatgttgacaatgaatgacaatttaattaccaatagaagatttcataagcatagaccagggtttctcaaattggggtgataaccctggggatttgtgaatatattctaatggatccccaagttctacataagttatataaaacacatctttgacaaagacaacgtgaaattggaaaacatatttacatttcaaatatctttgttaagtcagtgttcctcaaaacacatttttttaggatctcagaaaattttgttcctttagaaggtgtttcatcatgaagcattacttgggtttgagaaacaatggcacagaccatgtttccaagaaggttcaagaccatgatgtatataaccctcagtcagccagacaatgttgttaagcatatggagtggggctgggaggcatggaaacaagccctgaggaaatatggatatgaattaaaacgggctataagtgaagccagttcacttatatggttcttgttgctcctgctgtgatgcatgaatgtgcaccagaaaaaaagtttcgaatgttatgttaaacaatattttgtcagctggaaaacattaaggaggctaagcttcttttagctttacgaaaggtgggaggaaagaaggtatataaactacagcataaagtaggcaaggaaggtcaaggttttgacttcacttctccactaccctcttggcaaaaaggttccaaacttaaaaagtatctacgatatgcattatccatggtcatctgttcttgggcagaaatgtagtaaaattgtggaaggagccgaagtattagatttatgccctcaatctctgaactttaaaatactcaagcttatgagatttagcaatcactaatttgccaaccttcgcaaatagccaaacacaatggctatgctctatccctttcatctctttccatggctccaaaagaggtaaaaaacaaatgaaattaaaataaaccaactggactatccagatggctgcaatattaatcctatcttggcttaaagagaaaaagcaaacccacttccttaagtttattctatcaacttcaaatccttgtgggttcccttcctaaaactactacttatgattcacacaaaacagcacttattattttctaaagttatttcaaatgtgctcacattagctcctcaacgataaaatcatctcaggaatgaaattatataggatgatatcattcctacccaggttatcagtgtaacctagcatagagctgggtccacaatattaattctacagttctgctggttaactcacatatgtgtatttatgcatgtatgtatgtatctatttctctctctatatatatatattgcagatgaggtgggaagaaggaaagaaacttactggaccctctgacttttctataggtggcatctaagagaaagaaaatagaataggaaaaagattacttaatagctacgaagtagtacttacagtattctaaagagccagagactcttctttacagctgtccgaggagctagtagggcaaactgctccctgagctgggccgatcttttgacatccttctccgagaaacaatattctttttcagttattacaaagaactgctgttgtgatgactagttatttgcttgagcagttccatattacataatcctgtgccacaaaacaccctgtacactagtggctgggatattattcatttccactaggcagctatctcactgttgaaatttatatccaaaagaatatttaattttggcttatttttcttataaaatagggaactcgtcttatcatttttaagtcctcacctcagtgtggtacttcaaactacttcaaattattactataattaaatgcttcattttatataataattaataaaaaaggtggcatatgctttttaaaagcacctctgcatatgttccctcatttaatcgttttactgcaatcttcttgaaataagtaggggcaggtgctccagatgaagaaattaaaggattataaaatttaggtagtttttctaaaagtgaatgctggtaaagcccacacaaagatactggtcttaagagttccactctagaatatctttgatattaaaatagcaagagtcagtgttctatccacagacccaccaccctcagttaaaatgagagacactggtcaccaggtacatagtataaatggatattttggcttcaaaaaaataatgaccaggttatcgagtccaccctacaatccagatgtctttcttaaaaaaatttttttaataataataagcaatttttctggctgtatcctggcatttggcactttacaataacaatatacaaaggggacaacaagagattcttaaccaggcaatctgctctggaaagaagaatgcagagaaagtgccaaccttccttcctggggagacaattttatagtgtacactggaaacacaaaataaaggatggcaatccagctccctgggtctgacttgccttcagtattttgcacagtaaagcagtaacacaggtgggcaagaatggttcttgtccccagaatctgacaataattgaaactaggatcattaataaatgaaagaaaatgagtgaaggcttatccacctagttcaggcctgcttttcatagtcaacactgcaccaacacaccaaagtggtagggagatcttggactgatgggctgaaaaatgggacaatcagtactgtgtttattaataacacagaaggggctttgggtagtcagcatactcagaagcaatgcgaaaggaagtagaggggttcatgtataatgggtgggaccaaggaaagtgcaactgagaattgtttaagtccaagagaaagggccttgtctggtcaacattacccagcaaagaggcaaaaggggcagggcagagggaagggaagagggagacagcacaatcttacctaatagctgcaaatatggacacctgagattgtgagcaatagtctgtaaaaaggggccaagggcacacaaggggcagagagagggaagacttcgtatataaagcatgacaccatggctacctgtgattttacacactggcgcaatgcaaaagggttgggagtatggaccactgtttgatagacaagtgcatggaatactccaatgcttatactttattatgccatgggaaactaagggtggggtggggcgcttgcttaacaaggtcagggagggagaaaaccattgataactgccattgtgcctattaacagtcccaggagaagttttgagtagtcagcagcccctgcagtaatgcaaaggggatactagggcataatatcccactctaccagaaggagacatatataattgcaaatattcacattaacagtacaaggggccttagtgggtcagtacccccgatgtaagcaacgaggaagcaggagtcttatctaatgatcagtgcccttgataattgttattaatgctattaattgtccaagagctgagattatgagtagttaacacttctcagcagcaatccaaagggtaatgggaggaacatagggtctttttctcctacacaggtccacaaatacaattatgacattaatattaaaagaaaagggttcattcataattaacatgcccctgatgcaaggggaatatgtggagatcaactcttagtctaaaagaagaggtggacaattgcattaatgcatattaagtccaaaagaaggggcacttagtgaatatcatccccctgctctaaagcaaaggtggtacaggaacatgcttagagaattgagtttgtgcacatgaacattccaagtgacagtcttgagtagtgggcactacctgctaaaaacactaagaaagtaggtaggatccttatctagtgcacagatcaggagcaaatgtaattgcacatattaacagtccaaaacaacaggactttggttgatcaggacaccctgttgtactacaaaggaaaggtgatggggtatgaccttaatctactgacaaagacaaaagaaaatttcaattatatgttgatagtccaccagaaggggccttggagggaaacagtataccccacagtaatgcaaaagaggtataatggtcctagaagtgatagggttgtggacaactgcaattattcacattaactgttcaaatgtaaagatcataaggagtgggcacccactattgaaaagaggtggggcatccttgtctagggcacaagaaccaacataaatgcaattatgcatgtcaacaagccaagaaaaggggacttagggggtcagcaaccctggtatactgcaaatggagggtgagaaggtagaactttgtttaattaggatgaaccatgtggtgattacatacattaatgtccaagggacattgttgtggtcaattaaaaccatgtactttggacaaatataagaatcttaaaaagtagtgggtactccttgttgaaaagcaaagggagtccatgagaaggtgcccttatctagtacacaagaatatagacaagccaagcaaagaggcctcagtgatcagcaccccagctatactgcaaagggggtctgagagtaggactttattcaaataggataagccatgtgcagttatgcacataaatttccaagatgcatggttgtggtcacttacaattgtgcaccttgattgtccaaatgtaagggtcttatggagtgagcactccctgctgggaggaaaagaaagattatgcgtagatgggatggggcagaggaggcttccttgtctagtacacagaaacctggacaaatataatcacacacataacaggccaggaaaatgggccttggttatcagcacccctgctgtactgcaaaaggggtctgagagtaaggccttattcagatgagataggccgtgtgcagttacacacattattgaccaaggtgcatggctgcggtcacttagaattgtgcaccttgactgtccaaatgtaaggttcttatggagctggcactccctgccagaagggaaaggaagattgagggtggggtggggcaggggaggcttccatgtcttatacactggaacccagacaaatataatcacatacgttaacaggccaggaagaggggccttggttatcagcacacctactgtactgcaaaaggggtctgagagtaggaccttattcagatgggatgggccatgtgcagttacacacatttatgtccaaggtgcatggttgtggtcacatacaattgtgcaccttgactgtccaaatgtaagggtcttatggagcgggtacttcctgccagaagggaaaggaagattgggggtggagtgtggcaggggaggcttccatgtctattacacaggaactggaacaaatataatcacacacataacaggccaggaaaaggggccttggtgatcagcacccctgctgtactgcaaaaagggtctgagagtaggaccttattcagatgggatgggccatgtgcagttatgcacattcatgtccaaggtgagtgcctatgctcacttacaattgtgcaccttgattgtccaaatgtaagggtatatggagtggacactccctggtggaagggaaaggaagattggaggtggggtgtggcaggggaggctttcatgtctattacacagaaactgggataaatataatcacacacataacaggccaagaaaaagggccttggtgattcagtacccctgctgtactgcaaagggcatctgagagtaggaccttattcagatgggatgggccatgtgcagttacgcacattaatgtccaataatgtccaaggtgcatggctgtggtcacttataattgtgcaccttgattgtccaaatgtaatgatcttatggagggggcactccctgctggaagggaaaggaagactgggagtgggggtgggggcggggggaaggcttccttgtctaatacacaggaacccagacaaatataatcacgcacataacaggccaagaaaaggggccttggtgatcagcacccctgctgtactgcaaaaggggtctgagagtaggaccttattcagatggaatgggcaaagtggttatgcacattaatgtccaaggtgtatgcctgtggtcacttacaactgtgcaccttgattgtccaaacgtaagcgtcttatggagagggcactccctgccggaagggaaaggaagattgggggtggagtgtggcaggggaggcttccatgtctaatacacaggaaccgggacaaacataatcacacgcataccaggccaggaaaaagggccttggtgatcagcacccctgctgtactgcaaaaggggtctgagagtaggattttattcagataggttgagctgtgtgtagttatgcaaatccatgtctaaggtgcatggttgtgttcacttaacaattacgcaccttgactgtccaaatgtgagagtcttatggagtgggcactccctgctggaagggaaaggtgagactgaggtatgtggagaggaccctccttttctagtgcataggatcccagacgattataatcacacacaacatgccaagaaaaggggactgcgttatcagcaacccttctgtattgcaaaaggggtcggagagtaggaccttattcacatggaatgagcagtgtgcgattacgcacataaatgtccaagatgcatgcttgtggtcacttacaattgtgcacctagactctccaaataaaagggtcttatggggtgggcacttcctgctggaagggaaaagtggggatgaggggagcactttccttctctagtgcatagcaacctcgacaaatacaatcacacatattgggaggccaagaaatggggccttaggtgtcaccaaccatgctgtccttcaaaaggaaggatactgatgtaattgtcattaggcacattaacagtttgagaaaggggccttaagtgaatagtaccccatgcaataaagcaaagagggtgtgataggtcagaaacccaagtctaattgaaggaccattgacaactgcaattacatgccatctacagttcgaagagaagggcttaatattgattagcactctctgctttgataagtacaggagtcctgataaaaggcacaactgtatgcaactgaaaatgtgtatataacacctaagattatgcacgctaactttactagtctaagggtcttaagtagtaggtacttccagctgggatgtaaatacagtgggtggggtccttacatggtaaaaaagtacagcagcaaatataagtatgcacattaacagtccaagagagtgaattcaggctagttagaagctcctgcagtaatgcaaatggagcaaggaagcgggattctactctaacataggggcacatcaactactgctaattatgcgcatttaagcagtataagagaagaagcactagctagttagcactcctgctgctttgccaaggaggtgtgagggggatgggattccagggcaattgtcttacttttttttttttttaatgttggccaggctggtctcaaactcctggcagtaagggatcttcccacctcagcctcccaaagtgctgggattacaggtgtgagccaccacacccggcctcagggcaattttgcataatagaaattcaagaaagactttaggaaatcagtacccccttctatgatgctgagaagtcaagatattagcttgatataaaagctagatattagcttgatataaaagactcagttctaatcaattagacatttgaaatgtcttagacaattgaaatcaattaggcaattgaaaatatgcacattaagagtcatggataattagaaatacacattaagagtcccaagagaaggactctgggtttccagcatccctttctataatgtaaaaggggtagaatataggtttaaagggagagaccatgaacattggaattttgcacattcatagtcccagggaaaggtaacataggtaattaatatcccttgctgtaaaacaaggaggataaaatggatctgatctgaaagacattgttgtgatcagttgccatggttcacattaactatcctagtgcaaaggtcttgactagaggtcatccactgctgaacactagggaagtgagtggggtctttagtgcacaggaagagggacaaatgcaagtagcacattaacagtacaaaagaaatgtccttgtgattagcaccctctactgtaatgctaagagggtgtgagcagttgggatcttaatttaatggaaaagaccataattgcaattatgcgcattaacagtcccaagtaccccctgctgtaagacaaaaggaatatgaggggatgagaccccagactaacagcagatagggaaattgcattttgcacatcaataatttctggaggaggggcattaggtaaccagcaccctcttgatgtaaagcaaagatgatgcagggaccttgatataaaagactcagttctaatcaattaggattgtgcacataaactgtcctagtacagaggtcttgagtagtaagggtcccctgctggaatacaaagggagtggaagggttagtgcacaagatcgtggacaaatacaattatgaacatcaatgcacaagaagagtccttgggtgatcagcccacattgtagcgtgcaaataggatacagagtccctttctaatggacaggactctggacaattgcaactgtgcaaattaactgttcaagagctgttattgaataatctgcactcgttagcaacatcccacagaaggtgggatggggtgagaatccatttttattgcacagaaccatgaatatatgcaattatgcatatcaactgtttaagagaaggaaacttgggtagtcagaactcagcagcaatggcaaagaggacatcctagactaatgagtgggactatgggcaattagtgttttacatattaatgcaaggtggtaggtagttcacactatctaggagcaatgataaaggcatacacataagtgggtcttctctgttacgcagaaccatgaataattactattgtatccattaatattccaagggaaggggctctaagaatgagtcagtcccactgctgttatgcaaagatgtttgcaaaggccatagtgtaactaacagaactatggataattgggattttactcaataatttaagaaactcttaaatctcaggtagtcagcgctgcctcaaggcaaatgcaagggcgactggtagtcttcatgattaatgggtgagacaattagcaattactactttgttctttaattgtccaagaacagcaggattctccagaagcacagcaaaaagcgcagtagggtgcctttgtttaataggcaaagctatgacaattgggactgagcattttaactgtccaacaaaagacgggttgtctgcgaccccctgctgaatgcaaatggggttcagagtgctgtctaatccaatgggtaggattattggcaattagaattttactcaatgcaaagagttttaggtggccaacacagtacacaagaaaagatcactactcaaaattgggactgtgactacagaagcaatgacagagaaatggtttctcctttaagggcaggggatcgagaaaatgataagtaactcaaattgtgggcaataatgctctgatagaaagctctcaattgacattccctaacttcaacgtaccgagtaaggaaattctttgtcctgagatcacagacaaatgggattgtatgcattaactgaaaatggtcaaggagtcagtactgaagatcagcaatgccaagggtaaacggaatatcccagtataataggataagcaatggacaacttattttgagcactgaatcaatgaaaattagagtgactttcgagagaagctgggcgggactgaggaactaggactgggactggggctagggctggggggttaggggactggggctggggcagggctggggcggggtgggagtagggctggggctagactaggggtttgctgggagcagggctggggaggaactggatgctaggcaggcaggatacaacgaaaaattgaaatactccaatataataagtctgaatagaggacaccagaccacagcaattcaagtttcctgtctgataagtaggtgattagtcaattagtgcagcatcaaggatgggaacaaagcaaggcctggacctgtgtaaaccttcaaacactcttttttacattaggtcatgaagttaaattttttactgtttctgtgctacagactcttcaaaggaaaatagttaagtcaatttcaaagaaaatgaccagcacatttttaaaacattagaaatgatttgactttgactatctactgccaaaaaaaggttaaggaatttgtaatgagaagctaaaaactttaaggaattttaaggaactcaaaacaaaaactcattaaatgtaattaaagtgaattctacaaataaagcctcttaatacatttctataatagtcacttaagacttaaattcaaacactagcaaaccacaaaatcagactgtatgactgacatccaaaagataaatataaatcaaaatccgaccccagcattagccaaggggtaggtgttcctcttgaggaaggcaggaattcctcttctgccacctgttggccaacgatcatctgtgatccattctggtccttgccacggctcaccaccatgtccacaccaagcaggcctggagcactgcccatggcaacagtgcagtgcagggcagaccagaggggggtaggggggtaggggggtaggggggtggggaggtggggggtggggggtgggggtggggagttgggggggttggggggtggggggggaggtatacttagccttaggtgaggcaccaatacagaggaatggagggaggttcagaccacacagccagatatccagcactgcaagaggcagcactggacaggaggggacaaataagaggggacagaggtggaaaggctaaatgtccttgaaaagaccttgaaaacacctggtgtaccgcccactgggagacatacacgtggcccctccacttctttctcctgactggctaaagacagctgcgaagtgccatgctaattcacccaggtcttcgctgagtagctggacagtgtgtcatcagtctaattccatcttctgctctaattggctgtgatcaattccacccccatttctaattggttgggttatgcagcaatccagcactgtccatcccaccttttctcccgctctgcgtggcactaggcggcaaaacccgccatctttaacaatgcggcaagcccgccatgatgtccacgtgacaaaagccatgatatacatatgacaacgcctgccatattgtccctgcggcaaaacccaacacgaaaagcacacagcaaagacaaagaggcccgccatgttttacactgcggcaagaccttcagccgccatcttttcctgtgtgaccgcacatgtccaccaccatgctaaccacttaacaaagcctcgcccatcatgatgtggccttcccgccacttgaacactgcgacagaactggatccgccattttggacaacctaacaaagcacagcccgccatgctgagcaatgccgcaatgtcaaaatcgccattttaagccctgcaccttagtctttcctaaccttccatttttaactagtcccttgtactgataaaagatgattcttactgcctcccgatacaacaatcacgcaaagctcctaacaagccccaaatcaattcattcagataggtttagctcatgcaatgcacatgacttcctctgcctgacctgctatcatccatcttgcctccctagtttaacttagcacaaacgactagccctaagccgagttatgcggcaagtctaaaatggcggccacttttcctccacaatctgaacacgcccttagcttaactgcagagtcattctctgccaaagcggtaggtacactcacacaccaccaaatgatcagcagcaaaaaaaagtgtagatattccagagagtgcaacaacccacaaaaccaacattttttcatccataaaaagcaccgatgggcgatgaaaaaaaaaaatcaaagcaggtatccgcggccccgatgggccagaaaaacaaaaattaaagcaggtatccgaggccccgatgggcaaggaaaaataaaaaaaaaaaaagcaggtatccgaagccccgatgggccaaaaaaagaaaatttttaaaaagcagatatccgtcaccccgatgggccagagtgttgggggttcagaggggaagggaatcagcaggtatccgataccccgatgggctaaggaaaaaaaaataaaaagcaggtatccgcggccccgatgggcgaataaaaaagaattaaaaggcaggtatccacggccccgttgggcaaagaaaaaataataaaaccaggtatccgcagccccgatgggcaaaatatagaaaagagagtggaagagtaaaaaactgatccacaaaaaacagagatgtcaaccaaaaatgattccaaagaaaaattccttaaatattaaaaattgcctcaaaatattccaaatactttctttaaaaaaatatggaggacgtgtcaagaagacactaggagaaagtatagaatttaaaaaaatattttatggaatttaggtgatttttttaaagaaatacgccataaagggtgttgggggactagaaaatgttctagaaagaaccccaagtgcagagagatcttcagtcaggaagcttccagccccgagagagtaagaaatatggctgcagcagcgaattgcagcgctttaagaactgaagggggggctgagggcggagagagcataagaggcgtggcctagaagattgaaagccggacatctttgtgatttggttggttcaaaatttacccagtaaggacaaaaaagggaaatttcaagaaagcaaagacataccagaaagaacattaactggaagtagacttcatttctagaccaggagtcacaacttcaatgggttttccagttctcatctataacatggggacattgagtaaatcaagcaataattaatgctaaaatcctccataaactgcataataaatgtaaagatgttaattcagcttggttttgagaatgggggaagggataggtagagctttgatgtgttgataaagtatccaaatatatcattcaaaccagaatttgtaactcctccaccaaacttttgaaccaaagaagctagaaaggagtaatacattgaggttagtaccatcttcaagggacttcccattccattatcccatgtaatagataatggaatatgtattgcatagataataataaaggattattcctgttttatacattaaaatagagtcctatagaggttacatcatgtgcccgaggtcacacaccatgattcagagtcaatgtagtttttactccaacactctaccttgtatggctcccaaccataagagaacggaagtgcttacgagtcaattggtgagcaagagagaaaaaggaaagaaagacatttcatagaatggctatttggttcctaaataatcaagaaagagtactgtttgtgacctgtttgtaattttttaactatgactccttaatctttactattttcctatttcctccatgaatctgaggaacccaacattggaccaaccatatgacacagtagtgaagttgaccctctgtcagtaactgataagtggtaggaagaaaaagctcatataaaagccaaagctgccctcagaaacctggctatttcagtaggaagcaattaatctcataaactcttctatgtcattcgagaaacaacagagaaccagaagggagacaatggcaacttaagtattatagagcaacttctagaaagtcaaaggatacattaccctcccactggctgaactggaaagtgtaactatcgacccaaatctatcaggtaagcttgctcttcagtttccagaaaaataataaagtatgcaaattttcttccttaagaaataccttccatcttctaagtgtccttggatcaaacaaaaaaagtaatctgacttgtcattccaaatgagggttattgtattgtaaagtggtgcaatacaatggtacctttgagaaaacaatgcttaacaaagagagaaactacctacagtgacacctatgaagcagctatcagaaagactggattaccaaacctctaatacaactttatctactagaagtttctacaagtgtggaaatgttctatacttttaagaaatttggttggccgggcgcggtggctcatgcttgtaatcccagcactttgggaggccgaggtggctggatcacctgaggtgaggagtttgagaccagcctggccaacatagcgaaaccccgtctctactataaatacaaaaattagccgggcatggtggcaggcacctataatcccagctacttgggaggctgaggcaggagaatcacttgaatccaggaggcggaggttgcagtgaaccgagatggtgccactgcactccagcccgggcgacagagcaagactccatctcaaaaaaagaaaaaagaaatttagttggggaaaaattttctaaagactcaagtagcatcaaatataaaagattgataaatttgactctgaaattaaaaccttttgtttcacaaaaataccttttcaaataaaaaggcaaaaagacaatttataaactggttgtcctgggtttctgtgaccaggccctggttccaggtgggcagccacgctagcagatcactctcattggttgtcattggagttttttaaatggtaactcttaaggctaggcatgcaaaatggtgctgatgtgccgttatggggtgacactcacattggacacaggacatgttcagagctgtggcctacctaaatccactgttgacccttaggctaaagaaactgcaaaagcaagaaatttataatttcaatacaaagaggttccagagtgccattgcaaaaatggaagtagtacagtgttgctatgtttttctcatagagggagatgtgaaattagccaggaatggtgcatttgacaataaacacaaagagatgatttctggacctaaaaaggaagatatggtgcaaggtcattataaaaattgatatgtgaactgttgaataaacaaatacgtaagcatctcttctccacctggtattctaaattttcattgataaatcactacacctcacatgggcccatgtatttgtaatatatttttaatcaaactgtttacattaaaaggaacttctgaaaaatatttgcctaggcctttgccctagagcagtcctgccctcttctgccatttatcaccttcaggttttacttactcccctgccctcactagctttcaattcactttacttcctcctcttcccgacctggcctcaccttcactactgcttggctccattttataaacctgttaggatcagaagtatggaaactgagacactagaaggaaaagtgacttgctcaaagtcaattagctagtaagagttgggctctgatggggatatttcaggcatattttctgtggccatgccatagctgtgttagcatcctcttctttgggctcccaatcacatggcacacaataggaagaaatcaggtcctctttttaaagattcagattattccagttctaggattgtcactatgttcatctgtacatcctctcctctgctaaattaggcccaaaaaaagccggcactgtcgacttagccaccagatggcagcataaaatcaccaaagaagcactgagcctgtctgcaggaaaggagccaaagttgtatacagggcaggaccagaatctgatataaaggggggaaagtctgattcatacaaggtcagtatcagaagaaagggtcaaagaaaagtgctcaaccccctctaatttgaagagcccctccccccactaaacaggagtctgtccttggcttcagggctatgccatttaaagaggactttgataaagccttcaggatctaattagcaggctggtgggggccctccaaatcatcaccagtgaaaagcagttaaagggaccaggacatattatggaaaagaaaataaaagacctggggaagggctctttacaactcaaagggctgtctgcaatgggggaagttgatgaatagtcctgttgtgtgtagttctaataaataaagacgtctgaatactctgagctgtccaaagatggaacagttaacacctccagaactggtgaatgccagtctctgaagacctgcaagccaatagtggattttgtgaggatgctacagagacaatcaacagatagaaaagttgtgctatatgccttgtaagggtcttccaaatagccccaaatcctatgaacctcatcacagtacttgggccattcctctagccctcaaacacactatttatgatatccttcaaaagtgtattaggatgttgggaaaggttttctagtttatcaaaagagaacacggggttatacatattaaagctcagtgagtatatgcttaacaattgtatacatagttcacgtcaacattaaaaatactgtaaatgggctgggtacgttggctcacacctttaatctcagcactttaggaggccaaggcaggaggatcttttgaggccaggagttcgagatcagcctgggcaaaatagagagacctctgtctctacaaaaataaaaaatataaaaattagccaggcgtggtggtgcatacccgtagttctagcttctcaggaggatgaagcaggaggattgattgagcccagtagttcaaggatacagtgggctgtgattgccccactgaactccagactgggtgagaaagcaaacgctacctcaaaaaaaattacaatctattaaaaacatcaccagtggccgggtgcggtggctcatgcctgtaatcccagcactttgggaggccgaggcagacagatcatgaggtcaggaaatcaagaccatcctggtcaatatggtgaaaccccatctctactataaatacaaaaataagctgcacatggtggcacacgcctgtaatcccagctactcgggaggctgaggcaggagaatcgcttgaacccggaaggcggaggttgcagtgagctgagaccgcgccaagcctggtgacagagcaagactccatctcaaaaaaaaaaaaaaaaaatcaccagcaaacactagggagagggaggaattttatttcccaaggtatcacattataatattaaaactgtgcagtttttattaaaaaattacaaggcatacaaaaaacaggaaattatagctaatatatagaaaaaaaggtaattaacaaaaaatggtccctgagaaagtaccaacattaaacttactagacaaggattttaattaattaattaatgtgcttatttattttctcatttttagtttttctagtagttctttttcaaatgtatttttagttcacaaataattgtatatattcatggagtaaaatgtggtattttgatatatgcatgcattgtagaataattaaatcaagctaattactatatatctcagctcacatacttattttgtgatgagaatacttaaaatttacttagcagtttttgaaatgtacaataccttatcactattgtcatcatgctctgcaatatatctcaaaaacttattccttctctctaactaaaatttttatcctttgatcaacacatttttaccctcccttcagattattaaccaccagtctactccctacaagttcaagttttgaaaattacacatacaagtgagataatatagtattcatctttctgtgcctggcttagcataatgtcctccaggttcatatatgttgttgcaaatgacagattttccttctttttaaggctgactagtgttccattgtgtatgtataccacattttctttatacattcatctgttgatggggacttaccttgatttcatatcttgactattgtgaataatgctataataaacataggaggacaaatgtctcttcaacacactgatttcaatttctttgaacaacacccacaagtgggattattggatcataaggtagttgtatttttagtgttttcagaagcctccatgatggttgaactaatttatatttccaccaacactgtataaatgttcccttttctccacaccctcaccaatccttaacttttgtcttcttgaaaatagccattctaacaggtgtgaggcaatattgcattgtggttttgatttgcatttttcttttttttttctttctttcttttttttttttaatttttatttttttgagacagaatctctctctgtcgccaaggctggagtgcagtggtgtgatcacggttcactgcaacctccacttcttgggttcaagcaattctcatgcctcagcctcccaagtagcttggattataggcatctgccaccatgcccagctaatttgtatatttttaatagagacgggggttcaccatgttgaccaggctggtctcaaactcctgagctcaggtgatctgcctgccttggcctcccacagtgtgatctgtaatcacactgggattacagatgtgaaccactgcgcctggccttatttatttatgtttttagacacagtctcattctgttgcccaggctacagaaagtgcagtggtgccatctcggctcattgcaacctctgcctcccgggttcaagtgatcctcctgcctcagcctcctgagcgggtgggattacaggcacccaccaccatgcccagctaatttttgtatttttagtagagaagatgtttcactatattgggcaggctggtcttgaactcctgacctcaagtgatccacccgctttggcctcccaaagtgctgggattataggtgtgagccaccacacccagcctgatgtgcatttttgtgatgattattgatattgagcactttttcatatatctgtttgctatttggtttttgtttgattgttttttgtttgaggcagagtctcactctgtagcccaggccagagtgcagtggcacaatctcggctcactacaaccactgcctcccgggttcaagtgattctcctgcctcagcctcccgagtagctgggattacaggcgtgtgccaccatgcctggctaatttttgtatttttagcagagacggggtttcaccatgcttgccaggctggtatcgaattcctaacctcaagggatctgcccaccttggcctcccaaagtgctgggattacagatgtgagccaccgcacccagcctgttggccatttctaagtcttattttgaaaaatgtctatccaggtcctgtgcccattttttaattgagctatttgttttcttgatattgagttctttgagttctttctgtatactggatattaaccccttactggatgtatggtttacaaatatattctcctattccaaaggttgtctcccactctgttcattgtttccttgcctatgcagaagctttttagttacatgtaatcccatttgtctattttcacttttatttcctctgcttttgtgttcatatctaaaacattattgcccacaccaatatgataaaactttggaaccatgattacagtgtaagagtattctgaatttgaccatgtgtttacttttactggtaagttttatactttcatatcttttcatttcattcattaatatcttgttctttcagattggaaaactttgtttagcatttctaaggcaggccttgtttgatgaattccctcagcttatgtctgggaaagtttttatttctcattcaattctgaaagacagatttgctgattatagtagtcttagttgacagattttttactttagcacttagaatatatcctcacactctttcctggcccgtaaggtttctgctgagaaatctaatggtagccatattaaagcttccttgtatgtgatatgcttcttctgctgctttgagaattctttcttagtttttgaattttgatagtttgattgtaatgtgtcttgatgaactcttctttgggttgaatttaattgcatattcctgagcttcttgtaattcaatattctcttttcccagatgggaactttttggccattatttctttaaataagctgtctgcctctttcttgcactcttcaccatctgtagttttagtatccaaatagtagttttcttggtggtgtcccatagacctgtaggctttcttaatactttttcattttttttctttttcttctctgactggatgatttccaatcatctatatttgcattcagttatttgttattctgcttgatgtaatctgctattgaagcatctttggtattttttacttcagtcatcatactgttcagcttgaaaatttatctggttcttttttcaagttttgaatctctgcttaccttcttgttttgttcatattctgtcttcctgatcttttaaaaatatttgtttttttgtaatttgctgagcttctttagaacaattattttgaatactttgtcaggcaattcatgtacctccaattcttcgtggtcacacactggaaagcttcttgtgtttttctggcaatataatgtttccctgattcttcctcatccttgtagtcctgcaaaggtgtctgcacttttgaagcagcagtcacctctttcagacattatggcctggctttggcaaggaaagccctttacctaaggaggaaaaagggagacatactaggtgcactgtggcactgggtctagaccataggaaaccaaatgcaggggcatagtgtggctctgggtctggtggtgtggcggcagataggggccgagtctagtcagctcaggcatgcctacaacattggcaactgcatggtcctttgtgtcaagagctgtgggagtttcgcaaagattatgagggctgttggggtcctcagctatgtatatgtgacaaacagctagggtctgggactggcagcagtggaggccagagctgaaagtgtacacatgctccactgtggagtctggttgcagcagcagcctgttgtagtctcacacatggtagcaagagcttgggtcatatgccgaagctgggcctgaatgtgagcatagatgtggtggtaggtgctgcaggttgcccatgcctgatcacaagggccagatgcatggtggcaacaggggtcaggctgtctgcatgtgtgtgtttgtgtgtgtgtggcaactgcagggctcaactggaggtgggtaggcatgtgcagcatggtgataaatgcaggacccatggggcaggaccagtggcttatgcatgcaccactacaggaaccagggctggcagcatgcagtagtcctgcagagatcagccttgagtgtatgtggggtcaatttctgaggtgaggggctttggggctctttgcaggcacaggtgcaacagctgcactgggcctctgggccagagcacccatgtaagcaacatcaggggtggctttggaaaggatggttgtcttaggcacctgcggtatatgaaggccactgcagtagtaccctgggctgggacaaccacaacagaagcagttcaggtggctttggggaggagggtggttggttaggcacctaaagacttcaaggctcctgggttgtgtcaccaggctgaggaaactgcagcaatagcaatcctgccctacatggctcctgggaatggggaggggaggtaacgccagcacctaagactatgaaggtgaagaaaactgcaaggccttcagtagcaaaagtggcaggggggttattgctggtgtgctggcatttgtttttctcagtagtaaaagctgctatgttcctctgcaggacaagctgctgggctccacaatttcaaacactgaggaatcctcagcagttaaggctgtggggtctacacagcagctccaggggctgtttgggtcctcagtggagaagtctgctgctttcccatgtcaggtaggccactgggggtcacagtaacttccaccttttggctgattctaaaagagctcatccaggccaggcgcggtggctcacccctgtaatcccagcactttgggaggccgaggcgggtggatcacctgaggtcaggcgttcgagaccagcctggccaacatggtgaaaccctgtctctaccaaaaatacacaaattagccaggcatggtggtgggcacctgtaatcccagctactcaggaggctgaggcaggagaatcgcttgaacctaggaggtggaggttgcagtgagccgagatgacgccattgcactccagcctaggcgatagaccaagactccgtctcaaaaaaaaaaaaaaaaaaaaaaaaaaaccctcatcccttgtctttgttctcagctgtctccagatatctcagctatgcaggttacccccagagatctgggtggggtgaaactgaagctagtcatataggcagtgtcctaaaatactggcaaaactggttctataccttgctctgctttgtcttgcaaggcaaacttaagctagggaggtccctctccatgctgagcagtgtcagcatgaaggatgcagtgatggaggtgaaatgaacttgttcttattaccatttttgtgtggctcttcttgggttttctcttctactgtattgttgtgtcaccttaagtggatcctagcctcttccagagatattttggttcatggatagttgcagaattgttcttcacagggagaggaaggctgaatctcctactctgacatcatgctgacctcactccactagacaaggagtttaaattaaatatttcaaatatgctcaaagacataaaagaaacaatagacaaagaactaaaaaacacagagagaataatgtctcaacaaacagaaattatacattagaaatagcacttataaaaaggaaccaaatagaaattctggagctgaaaatacaataactgaaacaaaaaaattcattccaggcattcaacagaaaatttgagcagccaatagaaagaaacaacttgaataggtcaattgaaattattcagtctaaggggcacaaatacaaataattaagagaaatgaagagaatgtgagggacctatggaacaccatcaagatgccaacacacacattatggaagtttcaggaggggatagagtgaactagcattaaaaaaaagggagaaataatggttaaaaaaacttcccaaatttgataagacacattaatctacacattaaaaaaacctcagtgagccaggccaaccccaacagccccaggctccagaccagctcaccactaggccagcccccacagtcccaatcttcagttctaccccagcaatcagctgttccctgcaactctagtcattaggctgacacccacaaacccatctccaggccagcccctgtggtgccaggtttcaggcttgctccagcaccatgtcagcaatgctggacttaaacaccaggcaggcacccacagacacaggctccaggcctgcccagcaccaggccagtccccatgacctcacactctagctggaccctgtggcttcatagcttcagcagacccagggtccaggcctgtcccagtagacccctgtgctggatttgccactacagacacaagcttaaagattgccccagtgtactcaggtcacaggaaccctcaagtcatccaaacccaggccagccctcacagtcttagcctctaggccagcacctacacacccagcctccaggctgggacaagtggacatgagctctaggctgagcctgacagccccgtgcttaagaccagccccaggatctccaggcacaaagtcagttcccatagacctaggcttcagactagaccctgtgaacccaggctttacaccagccctagcaccaggttagcctaggttgatcccagtggaaacaggctccagaaaacacaagatccaggcttgttccagcagacgcagggtcaaggcccactgtagtagacgccaatggcgggctagatcccatggactgaggcttcaagactatatctgcagacataggatccaggccaggccctgtgggcccaggacccagacctgcactatggactcagggtccaggccagccccagtgccaagccagtgcttgtggactcaggctccaggatcatcccagcacctgcccagcccctgtagatgtaggtctaaggcccaccccatcaagtgctagatcagcctctgtggaccaggcttcaggcttgcctctggagacacaggtctcagcctcagactcatggacccaggctctgggctcatcagtgcagtcccaattaacaggttcacccaagtggatgcaggtccagactcaaccctgcagtttaggagtcaggcctgtctacctactgacccaggcgtaggccagcttgttcaaggactccagcaacaaggttttcttcaaatcacgcctgagagcctgccaagaatatttggatgagctgattggtgaagggctttcccaggcaaagcattctataaaaactgaaacaagtcccaaattgttcaaatccacagacatcaacttaaggcaacaagaaacatgaaacaccaaggagacataacatcaccaaaaaaacacaataatctctcagtaggccgggcacggtggctcacgcctataatctcagcactttgggaggccgaggctggtggatcacgaggtcaggagttcaagaccagcctggccaagatggtgaaaccccatctctactaaaaaaaaaaaaaaaaaaaacaaaaattagccgggcatggtggcgggtgcctgtaatcccagctactcgggaggctgagacagagaattgcttgaacctgggagttggaggttgcagtgagccaagatcgtgccactgcactccagcctgggcaacagaggaagaatccatctcaaaaataataataataataataataatctctcagtagctgaccccaaagaaatggagatgtacagactgcctggcaaataattcaaaataattatttaagaaagttcaggctggcgcagtggctcatgcttgtaatcccaccactttgggaggctgaggagggtcaattgctttagctcaggaattcaagaccagcctggacaacatggtgagaacccgtctgtactaaacatacaaaaaaaattagtcgggtttattggtgcacacctgtagtcccagctacttgggaggttgaggtggatcacttgagccctgggggtggaggttgcagtgagctgagatctcaccactgcactccagcctgggtgacagagtgagacctacccagtctcaaaaaaaaaaaaaaaagttcaacagcttaaataaaacaattaaaagtaataataatgactaaaagaacaaatttaactgagattgaaattaatttttaaaaaaatcaaacagaaattctgaagctgaaaagtaaaaggaatgaaatgaagaggaaatctgtgaactcataagactagcaatttgaaaatatatcatcagaggctaaagaagaaaaggaatgaagaaagcttacttcatttatgagataacatcaacagaacaaatattcaagttatggaagttcattaaagagaagaacaggctgggcgcagtggctcacacctgtaatcccagcactttgggaagccgaggtgggtggatcacccgaggccaggagttcaagaccagcctggccaacatggtgaaaccccgtctctactaaaaatacaaaaattagctgagtgtggtggcaggtgcctgtaatcccagctacttgggaggctgaggcaggagaatcgcttgaacccaggaggtggaggttgcagtgagccaagatcactctattgcactccagcctgggcaacaaaagcaaaattgtgtctcaaatgaaaaaaaaaagagagagagagagaaagagaagaacaaaggggaagaaagcttatttaaagaaataatggcagaaaaaaaattcaaatttggagaaagatgtaaatatccaaatacaggaaggtcaaaagtttccaatcagattcaatccgaatgtaataagactacatcaaaacatattacatattataatgaaactgtcaaaaatcaaaaacaaagaaaaaattataaaagcagcaggaaaaaagaaccaaataatatataatggtttttccaataaggctagcagatttctcagcagagaccttataggccagaagaaacttggatgagatgttcaaagtgcaggaagaaaactgccaaccagcaatactgtacttggaaaagctgtcctttagaaataaagatgaggttgggcacagtggctcacacctgtaatctcagcactttaggaggccaaggcgggcagatcactagaggtcaggagttccagaccagcctggccaacatggtgaaaccccgtctctactaaaagtacaaaaaatcagccaggcatggtggcacacgcctgtaatcccagctactcgggatgctgaggcaagagaattgcttgaacccaggaggcggaggctgcagtgaggcaagattgtgctgctgcactccagcctgggcaacagagtgagactccatctcaaaaacaaaacaaaccaaaacaaaaataagtgaaaggtcaaatgctctaatagtgtaatggtggtggtttgtgaatcatttttatttttagtatgaaggttataagacaaagctattaaaataatagtagcaccttgggaggctgaggtgggaggctcgcttgagctcaggagttcaagaccagcctgggcaacataaagagaccttgtctctacaagaaaatttttaaaaaattagatggaatggtggcacatgcctgtggtcctagctacttgggaggctgaggtgggaggattgcttgaattcaacaggtagagtctgcagtgagccatgatggcaccactgcactgcagcctgggtgacagtgagactctttctgaaaaataataaaaataataatagctacaataatttgttaagggatacgcaatataaatatatgtaaattgtgacatcaaaaattttaaatgagggagggaacagaataaaatgtaaagtttttgttttttttgtttttttgtgtttttttgagacaaggtctcactctgtcacccaggctggagtgcagtggtaaaatctcagctcactgcaacctccacctcctgggttcaagcgactgtcatgcctcagcctcctgagtagctgggattacaggcacatgccaccatgaccagctaattgtttttgtattttttggtagagatggagtttcaccatgttggccaggctggtctccaacctgacctcaagtgatccgcctgtctcggcctcccaaagtgctaggattacgggtgtgagtcaccgcacctggcaaacgtagagtatttttatgtatctaagataagctgttatcagcataaaatagactattataactataagaagccttatgtaagcctcatggtaaggacaaagcaaaaacctatagtagatacacaaaatataaaaagtaagaaatgagtcagacatggtggctcacatctctaatcttagcactttgggaggctgaggtgggagtattccttgatgccaggagtttgaaaccagcctgggcaacacagtaagaccccatctctacagaaatttttttaaaaattagccaggtttggtagtgcatacctgtagtcctggctactcaggaagctgaggtgggagaatcacttgagcccaagaggtggaggctgcggtgtgccatgagcatgccactgcactccagcctggaaaacaaaataagaccctgtctcaaaaaataaataaataaataaataggaatgaaagcatgctaatagataaaatcatataattacaaaggaagaaaagacaggaagaaagaaacaaaaggtctacaaaataaccagaaaataactaacaaaatggtagtagtaagtccttacctatgaataattaccttactgtaattggattaaattctccagtcaaaagaaagagtggctgaacgagtttttttatagccaaaaaaaaaaaaaaagcctcagctataggctacctacaacaaatgcacttcacctgtaggaaaacacacaaagtaaaaggatggaaaaagatattctatgcagatggaatcaaaagagagcggagtacattgtatttatattaggcaaaatagactttaagtcaaaaaccataaaaagagacaagggagatcacactataatgataaaggggtcagttcattaaaaagacataacaaatataaatgtacatgtaccagccgggcatggtggctcatgcctctaattccagcactttgggaggccagggcaggcagatcacttgaggtcaagagttcgagactagcctggccaacatggtgaaaccccatctctaccaaaaatacaaaaattagccaggtgtggtggttcacacctgtaatctcagctacttggaagggtaagacaggagaattgcttgaacctgggaggcaaaatttgcagtgaggcgagatctcaccactgcactccagcctgggtgacagagcaagactcagtctcgaaaaaaaaaagtatatatatatatgtttgtgtgtatatatatgtgtgtatatatgcatatgtgtatatgtatatatgtatgtgtgtatatgtatatatgtgtatatgtatatgtgtgtatatgtatatatgtgtatatgtatatgtgtgtatatatatatatatgtatatacacacacacacgcacctaacattggagcacttaaatatataaagcaaatgttaatagatctgaagagagagacaaactataatataataaaagtagggaacttcaataactcactttcaacaatgaacacattctatagaaagtaaatcaatgaggaaacataggacgttgttttgagaccccccagttaaattaaggttccagtactagagtggctagcaaccttgacctaggggaacatgaaagggagttagacatgggtgtttacagtgtgcctttcatgggatacttcttttacctggttgacagcctaatgcctagctgtctgacctgtaaccaggagagtgccctcacacaggaaacttgtttatactggcagagaccagatcactgtgacttttgtctgacttgtgtccaatttatgccatgcttgccatcactctgccactgggagccagacatgattttctcaccagcattctgggcaaaactcagcctggagcagccccgagttcttcaggtgaaaggtaaaaaatcaatatgtaccacaataggaaacaagttcaaagatttttacttagattctggtcaggtggccaggcatggtggctcacacctgtaatcccagcactttggaagaccgagacaggcggatcacctgaggtcagtatttcaagaccagcctggtcaacatggtgaaaccccatctctactaaaaatacaaaaattagtcaggtgtggtggcgcacgcctgtagtcccagctaatcaagaggctgaggcaggagaatcgcttgaacccgggaggcagaagctgcagtgagccgagactgcaccactgcagtccagactgggtgacagagtgagactccgtctcaaaaaataataataatattaaaataaaattgtattcaaaatggatattgaggcaacataaaattttaagaattttctacaatccacccattggtgcctcagcattatattttaagtctaaagcagctgtggttgaatggtgaagatatattaactttaaagagaaagagaggttgtggtggttatattcgcaaggtgagaaactgtggtggaaagctgggggtcgtagtagaaaaagacatcagggagtgggtagtcctcccctagggtgtcaaggggttgatgaatataggggctggtgtttcctggggaaagtactaatctccattaattttagtaacatgtatcagagtcccttgtaggtgtgggatgtgagggtaacagagagcaagaaatgtaccagaatcatgggctaagcaaaaaaagtcctgtgtccatttgtgtcttaggagaagcagtccatggacatcactagagtgcagatttagtgcaagtggggatgtcctctgcagcacagaggcagagtcattcccaacaccaacgtcttgggttgggtgatattgtctgaggcaatgtcatacccagcagtaaagttttgagttggggcaatatcctctgaagctatgtcatctccataggtgagattttgggccaagacaatgtcatctaggatatgggactgggtatcctttacaagtgggtacccactcaagtagatgtgggcctcagcatttttcatgtttacttgaaacaatcaactactggagggtttgggcctctggttctaaaccaattaaagcacccaaaccactggtaagaagaccaacgatcaacagaatagaatgcagttgcacctgatagagttttgttttaggtggaaatttaggttcaaatggtaccttatcatatgagaagctgtctggtctatgggaaaagctatggttaatgaatctgaggagagtaagtgtctttgatctggtctccagcctttatgggatgggagtaagatcaaaaaattatttcaaaaaatagattaaggcctggggcaaattagagagctttaggagtgtatttgttggactggaatttgaaaagaaattgttgccaggtgcggtggctcacgcctgtaatccgagcactttgggaggctgaggcgggcggatcacctaaggtcaggagtttgagaccagcctggccaacttggtgaaagtctgcctctactaaaaatgtaaaaaattagccaggcatggtggtgggtgcctgtaatcccagccactcaggaggctgaggcaggaaaatcacttgaaccctggaggcggaggttgcggtgagccaagatcatgccattgcactccagcctgggtaacaagaatgaaactccatctcaaaaaaaaaaaaagaagaaaaaagaaattgtttgaagatatcattgtatctcccaattaaatcagttatttggaatctatcttttgttttattttttattttattttatttatttatttatttgatactgagtttcactcttgttgcccaggctggagtgcaatggcatgatcttggctcaccgcaacctccgcctcccgggttcaagcgattctcctgcctcagcctcccgagtagctgggattacaggcatgcgccaccacacccagctaattttgtattcttttagaagagacagggtttcttcatgttggtctggctggtctcgaactcccgacctcacgtgatctgcccgcctcagcctcccaaagtgctgggattacaggcgtgagccactgtgcccagttattatttattttattttatttttttgagacactcttgctctgccacccaggctggagttcggtggctcaatcttggctcattgcaacccctgcctcctgggttcaagtgattctcgtgcctcagtcacccaagttgctgggactacaggcgtacaccaccatgcctggctgatttttgcatttttagtagagatggggtttcaccatgatggccagggtggtctcgaactcctgacctcaagtaatctgcctgcttcggcctcccaaagtgctggaattacaggcgtgagccaccgcacccagtgaaagcctttatttctaggacaacccagttagccagccatgtgttattttaatggtgcataacatgagaatttcttgcattggaagccctgaagtaactaatgactatcatgagtggtccagagattccaggaggcatgaaaaaggttgctgtgaacaagttttttgaaagtactaacaggagtgatggttaattttaatttataagtaaaaaaagacattggacttatatgtacttattgagtgtgtcagatgaatctccttgaaaaaggatgtcattactgtaatggcatacctgtgttcctggagaaaggtagatgtcatcaaaatgttatctgcaaagcctgtcccaaataagcaatctctgaggaaacttgttaaccactagatcaaccttaaaagtaattgtcaggaagttctaaacctagaaaaaaaaaaaagacatttgccatcataaaaacatgaaaggataaaactcactggtaaagcaatcatcacacaaagaaggaagaagaaaacctcaaattttaccattacagaaatccaccaaaccccaacaataagcaataggagaaaacctaaggaacaaagaatatataaacaaccagaaaacaattgacagtatgacaggaacaaaacctcaagcatcaaaaataaccttgaggctgggtgcggtggctcacgcctgtaatgccagcactttaggaggctgaggtgggcagatcacctgaggttgggagttcaagactagcctgaccaacatggagaaaccccatctctactaaaaatacaaaaaattagccaggcatggtggcacatgcctgtaatcccagctactcaggaggctgaggcaggagaatcacttgaacctggtaggcggaggttgcagtgagccaagatcacaccattgcactccagcctgggcaacaagagcgaaactccgtctcaaaaaaataaataaataaataaccttgaatgtaaatggattaaattctctacttgaccagtgaagacacatatggactaaaagagatggaaaaaaatatttcacacaaattgaaacccaaagcaagcagaagtagctatatttatatcagataagacagactttaagtcaagaacaggccaggcatggaggctcatacatgtaatcgcagcagtttcggaggccaaggtgggaggatcacttgaggccaggagtttgagacaaacctgagcaaaatagtgagaccctgtgttgacaagataaatattaaaaaattagccagatgtggtggcatgtgctactcaggaggctaaggtaccgaccatttatgcccaggagttcaaagctgcagtgagccatgatcacatcactgcattccagcctgggcaccctgtcttattgttattatataataacaaagggatccatccagcaagaggatataataattgtaaatatatatgcacctaacactagagcaccaagattcataaatcaaatattggccgggcgtggtggctcatgcctgtaatcccagcactttgggaggccgaggtgggtggatcacctgaggtcgggagttcacgaccagcctgacatggagaaaccccgtctctactaaaaaatgcaaaattagccggggtggtgatgcatgcctgtaatcccagctgctcgggaggctgaggcaggagaatcgcttgaacccaggaggcagaggttgtggtgagccaagatcgcgccactgcactccagcctgggtgacaagagtgaaactccgtctcaaaataaataaataaataaataaataaataaataaataaaatattactagatataaagagactgtaatacaataatagtggggaaattaaacaatccattctcaacattagacagattatctaaacagaatatcaacaaagaagcattggatttcaactgcactctataccaaattgacctaacagatgtttacaaaacattctatctagcaactgcagaatatatattattttcatcagtacataaaacatcctctaggatagaccatatggtaggccacaaagcaagactccacaaattttttaaaaatcgaaatcatattgggtatcttcttagaccacaatggaataaaactagaaatcaataccaggaggaactttggaaactatacaaatacatgtaaatcaaacacaatgctcctgaataaccattgcatcaacaaagaaattaagatgaaaatcaggttctggttcaagatggctgactagaagcagctagtgggcacctctctcatggacaggagttaaaatagtgagtaaatactaacatttcgagtggatcatgtaagagagcatgctgaaattcaccagagaaacaataggaaccatggagaacacaggagaatgaagctaggcactgtgcttagccaggatgggtgtggagctaggagaggcttcctaacatgggagacaggtgagtgagtgagagattcaaggggttccacatctccaacacggaccattacaatccaagtcatggaagagcccccttgactccccttaggtctccagactaacacagggagccacctggagactgagcagaggtaccactcaagcccacgtggaattcaacagacttttgatccccaagcagccttgagccaggtgctgctgccctggccaaggagggaggtcaggcattttcacatgctcctaggagagataccatggccatggtaagaaggaatgggtacatgacaaaccatatggctcccacctctgctgcaccctgccaaacagggcttgcctgcttttggggcagaacaccaacaaaccaaccctgcccccaccttaacattgcaggcacagttcaactcccaaaggcccccagctcccagaagccatctaaaggccctctgtagcctctgctactgcgtccttaactcctgccacccacaggccagggaagaaatgaggagggaggaaacttttgtgcaccccagtcatgatacagaggagtggtcaggctgcacattgcatgatccctcacctccatggctccccaccagacatgatatgcctgcttcaatgaaagtctcccagcacagcacaactgccctgctcttgcctgaacactgtggctatatcttggcattcctctgagggcccaaatcctagaggtcactgttaggcccttccaagttgctgccactgctgcctctgctcctgctgcctgcaggccagggagggaatggggaggtggggcaatattgaacacccctaagacagaaccaaggctcctcaggacttagcatgtccttctaggattgttttggaagggaccagctgtgcagataccatggaggtggtactgatctttgtatacagcctgctcgtcccggtggtcctggccagtgcagctaaggagaaggaaatagatccttttcattataactaccagaccctgaggattggaggattggtatttgatgtggtcctcttcctggttgtgagcctctatagagtcttgctctgttgcccaggctggagtgcagtggcaggatctcacactgcaatcactgccttctgggttcaagcaattctcgtgcctcagcctcccaagtagctgggattacaggtatgcaccaccatgccccgctaattttgtatttttagaagagacagggtttcaccatgttggccaggctggtcttgaattcctgacctcaagtgatctgcccgcctcggcctcccaaagtgctgggattacaggtgtgagccaccgtgcccagccgagctgccatcttctaagtcacaggtgcaagtgcagtttcaatcagaagccccaggatccaggagataaggaagctcaggtggaaaacttcatcactgcaaatgcaaaagagccccagaaagcaaaaaactgaagtgcagcccacaggtaggcagcctctggaactggaaggtagctgcttgaacctttagatgcaaatatcgatgcttaagaaaaccggccactttagcaacagatattttcccaggagaaggcaagaacttgtgcatctccctgtgcccatccctatctcttctaacaacattcttcaacctaatgatgcaactaacatttgcctccctcatgcagcctgtggtcttgcccagctcctgttacgtgtctgtgtatgtgcgtgtttgtcgactgtggtctttgtggctacttgttcatggatgatattgtgttagtgaactgtggagactcacttttccaggcaggagcggagccatgtcaccactgatccctccctgccaccacgagtctccatcatctcctgcttctaggagtccacttattccctgagagaccaaccccttttgttgatttagggatgggtttgggtaggagcatgggcaggaatctccaattatcctaggacctggggaggtttgcatcaccgtcattatagttcctcatggaccctcttcactcctctacaagaaactcgcttccttatttcaccctcacatgagtctatcctgaaggtctcttagtattaataattggagattcaaagcaagaagctggtgagcccagccattgccttcaggcaagctactccctttcatgatcatttttttccaggaggcctccactgagaagtctgcatcaaccctgcccttctgcagagttcccagtgattttaggctaagggcttctactctacccctggggaatgtgacccttgcgtatcttctcagcaataaccccatgggctctgggactgtacccctcttcaaccttccctgcttctgagatttcaatctacaagccagctcatcaggatgcagactcctatccctaaagttgggtaactggcaggtgatggctgagggacccccattctgttggggccaacacactgggatgggcagagtgagagtaggggtcctttgattctctgcccatgttcccttggtcagacaacagagacaaatcctgcatcctttgctttgcctgtcagtattcagagttgtgagtgaggaaggttagagatctggaagactctgtatagccctgctgcagagggaacagcaagaggtcagaggttacaataagaacagtaactcaaaccagtttctgcccctactgtcctccatgttcctgtggaaaccaaactgctgctatgaccatactgctgttctctctattgtgatctatcctctcaacaacagaaaaaagacataaaatattgtttccaaaagaaagacacaacctgcagccacaatgcaaaggagcaggcagaatacacacagtgtgaacccatgcttccatggctccatgcaagctaaggcttgcctgtttcagtaacaggccccacatgtacctgccccacccttgcctgaatgctgtggctttgggtgaactcccagaggctgccaactcccagaggccgctgataggccctccacaccctctgccactgctgcttctgcccctgctgcccacaggccagggcagcaggcaccttcataggccccaacagtgaaatccagaactgcttctgtggaggaaagtgcaagcaggccgcatgctccacagctgccagtctttactgcctcagaagagggggcctgccctccccagtgaaagtctgacagcacagctaccctgctcttgccagaccatttcaactgcagcccagcccccataagcctgttgtctccctgcccctgcctaagagttctgccagtgacccagggaccagactaccattctcaatcacatcaagcacctgaaatgtgggctgacacagtcctggtccagcccctttcagactcatacatgacattcaatgggccatataggggcctgagaatagaggagtcatctactctagtccaccactgctggcacctgaccacccccacccccagggtcggaggttggaccagcccaaccagccaatatcaccacaactgacacccacatacacaggccaaatgacagagcccctactcctttctacatgaagcagcagggttgctccatcagagaacaggcaagccataaatctgtctgtattgagctgagtgaagaggttccatccccaaaccactccagtggagaactgtgagtcaggtaatttccatggctctcagctacactgtggcctggagatagaaaacagtgcatctgaaaggagagtcattagcaccaggacaggggtgtaaaggagaaacagatcacattcctgcatatctagggtgtgaagtcagtgcagctcccttaccccctgcagagaccttggtgcatctcactaggagctcccccagccaccccagtcagggctggtgccttcacttgtcattgggatatttatgggcaaggcagggctggtgcctttgcttgtcattggggtatttatgggcaagtcaggagtgattacatacacagcagcttgtgccccagctgggtctttgttagtgccacttactggcctgcaggtctgactgcacagcccaatgtaaaacctaataacaaaagtgcacaaccaaaggcaaagaatttacccaacatacactacagttacactctctagaggaaatatatatatgtgtgtgtatatatatatgtgtatacacatatatgtgtatacgtgtatacatatatatgtgtatacatgtatacatacatatatgtaaacatacatatatacgtatgtatatatacacatatatacacgtatatacgtatatatgtgtatatacgtatatatgtgtatatatacgtatatacacgtatatatgtgtatatacacgtatatacacgtatatacgtgtatatatgtatatatgtgtatgtatgtatatatgtgtatatgtgtatatatgtgtatacacatatatacacatatgtgtatagatatatagatgtgtatagatatatagatgtgtatacacatatatatgtgtatagatataaagatgtatatacacatatacatatatgtgtatagatatatagatgtgtatacacatctatatgtgtatagatatatagatgtgtatacacatatatatatgaaaaaaatcccacctgaatgaaaataaattcataaagaagtggcagcctctctagatgagaaggaaccagcataagaattctgtcaccatgaaaaatctgaatgttgtaatgccaccaaaggatcacactagctctctagaaacagtcactaaggaaagtggaaactcaaaatgacagataaagacagataaagacattttaaagataaagacagataaagacattttaaagataaaatgacagataaagagatcaaagcatggttttgcaaggaagttcaatgagatccaagagaagattggaaatcaacacaatgaaaccgtgaaagcaatccagaaaatgaaggaggatattaatatctttaaaaaaaaaacagaacttctaaaaatgaaaaattcacttaaggaatttcaaaatgcaattgaaagctttaacaatagactagaccaagcagaagaggaagataggtttttttttttttttaattttatagggatgggatttcacaatgttgcccaggctaggcataaactcctggacccaagagatcctcctgcctcagcctcccaaagtgctggcagtacaggcatgatccaccacacctggcaaaagataggtctttcaaattaacccagtcagacaaaaataaagaaaaagtaattttataaaacaaacaaagcctttgagaaatatggaattatgtataattcaagaaaacttccttcacctttctatggaggtagacagccagatacaggaaattcagaggacacctatgaaatactatacaaggggaaacattagcaaggcgtatagttatctgactatccaaagccaacactaaagaaaaaaatcttttttttgttttgtttttgttttttgagacacagtctcgctttgttacccaggctagagtgcagtggcacaatcatggctcactgcaacctctgcttcctgggttcaagcgattctcctgcctcagcctcccaagtagctgggattacaggcgtgtaccaccatgcccagttaatttttgtatttttagtagagatggggtttcgccatgttggccaggctggtctcaatctcttgacctcgtgatctgcccgcctcagcctcctaaattgctggtattacaggcatgagccaccatgcccagcccaagaaaaaatcttaaaggcagctagagaagagtcaaatcaccttaaaggaaaacccatcataccaacagccaacttttcagttgaactcctacaagccagaaaacactgtgggcctatttttaccctccttaaggaataaaaaacaagcaagaattttatatccttccaaactaaacatcacaaatgaaggagaaatcaagtctttcccagaaaagcaaacactaaaggaatttgtcacctctagattggtcctacaagaagtgttcaaaggagttctaaacatggaaatgaaaggatgataccatcataaaaggacacataaccacaaagctcacagatctcataaaacaattgaaaaattaaaactccaaaacaactaacaacactatgacaaaaacaaaatgtcatatatcaatactaaccttaaatgtaaattcaaccttaaagggttgaatgctccacttaaaatatacagagtgggccgggcacagtggcatatatatatatatatatacaaagtggcaaattggataataaaacaagacctaactatcttctgcctacaagagacccacttactggccaaagataccttcagtctgtaagtaaaaagatggaaaaagtagaatgatttataatcctttgggtatatacccagtaatgggattgctgggtcaaatggtatttctagttctggatccttgaggaattgccacgctgttttccacaatggttgaactaatttgcagtcccaccagcattgtaaaagcattcctatttctccacatcctctccagaatctgttgtttcctgactttttaatgagcgccattctaactggtgtgagatggtatctcattgtgtttgatttgcatttctctaataaacagtgatgatgagctttttttcatatgttcattggctgcataatgtcttcttttgagaagtgtctgttcatttccttcacccacttttttatgggattgtttgtttgtttcttgtaaatttgtttaagttctttgtagattctggatattagccctttgtcagatggatagattgcaaaaattttctcccattctgtaggttgcctgttcactctgatgatagtatgcacacatatgtttattgcagcactgttcacaatagcaaagatttggaaccaacccgaatgcccatcaatgatagactggataaagaaaatgtggcacatatacaccatggaatattatgcagccataaaaaaggatgagttaatgtcctttgcagggacatggatgaagctggaaaccatcattttcagcaaactatcacaagaacagaaaaccaaacaccgcatgttctcattcataagtgggagttgaacaatgagaacacatggacacagggaggggaatatcacacaccagggcctgttgaggggtgaggggctaggggagggctagcattaggagaaatacctaatgtagatgatgggttgatgggtgcagcaaaccaccatggcacgtgtatacctatgtaacaaacctgcacattctgcccatgtaccccagaacttaaagtataatttaaaaaaaatttaggctgagcgtggtggctcacccctgtaatcctagcactttgggaggccgaggccagcagatcatctgaggtcaggagttcaagaccagcctggtcaacatggtgaaaccctgtctctactaaaaatacaaaaattagtccctctccctctccctctccctctccctctccccggtctccctctgatgccatcaaagttgtgaaagctgaggctcgactgtactgccaccatctcggctcactgcaacctccctgcctgattctcctgcctcagcttgcagagtgcctgggattgcaggcgcgcgccgccacacctgactggtttttgcattttttggtggagacggggtttcgccatgttggccgggctggtctccagctcctgaccacgagtgatctgcctgcctcagcctcctgaggtgccaggattgcagatggagtctcgctcactcagtgctcaatgttgcccaggctggagtgcagtagcgtgatctcggctcgctacaacctccacctcccagccgcctgccttggcctcccaaagtgccaagattgcagcctctgcccggccgccaccccgtctgggaagtgaggagcatctctgcctggccacccatcgtctgggatgtgaggagcccctctgcccggctgtccagtctgggaagtgaggagcgcctcttcccggccgccatcccgtctaggaagtgaggagcgtctctgcccggccgcccatcgtctgagatgtggggagcgcctctgccccaccacctcgtctgggatgtgaggagcacctctgcccggccttgaccccatctgggaactaaggagtgtctctgcccgaccgccaccccgtctgggaggtgaggagcgtctctgcccggccgccccgtctgagaagtgaggagcccctccgcctcacagccgccccatctgggaagtgaggagcccctccgcctcacagccgccccatctgggaagtgaggagcccctccgcccggccagccgcccaatccgggagggaggtggggggcgcctccgcctggccactgccccatctgggaggtggggggcgcctctgcccggccaccccgtctgggaagtgaggagcccctctgcccagctgccactccatctgggaggtgtacccaacagctcattgagaacgggccatgatgacaatggcagttttgtcaaatagaaaagggggaaatgtggggaaaagaaagagagatcagattgttactgtgtctgtgtagaaagaagtggacataggagactccattttgttctgtactaagaaaaattcttctgccttgggaaaaaaaaaaaattagccaggtgtggtggcacatgcctgtaatcctagctacttgggaggctgaggcaagagaattgcttgaatctgggaggcggaggttgcagtgagccaagagggcgccactgcactccagcctgggcgatagggcaagactctgtctcaaaaaaaaaaaaaaattaaaataaagaaacaaaaaaacaaaacaaaacaaaaaaacagatggaaaaagatatcacacaaatgaaaaaaaaaagaaagcaggaaaaaccattctcataccatgtaaaagagactttaaaacaagaacactaaaaaataaaagacaaagagaggcattagataatactaaaggtttcagcatggcaaggagattggacaattttaaatatatattcatccaatactggagcacccagattcccaaagcaaatactaatagtcctaagaaaacagatttataggaataaaataatagtgggggacatcaacacctcactaacatcactacacaaatcatcaaggtagaaaatcaacaaagaaggccaggtgtggtggctcatgcccgtaatttcagcactttggcaggccgaggtgggtgcatcacctgaggtctggagttcgagaccagcctgaccaatatgatgaaaccccgtcactactaaaaatacaaaaattagccggccatagtggcatgtgcctgtaatcccagctacacgggaggctgaggcaggagaatcgcttgaacccaggaggcagaggttgcagtgagccgagatcgcgccattgcactccagcctgggcaacaagagcaaaactccgtctcaaaaaataagaaaaaaaaaaaaagaaaagaaaatcaacaaagaaactctgtacataaactatagacccaatggacctaatagacatttacagagcatttcagccaatgacttcagaatatacattcttctcatttgtgcatgtaacattgtctaagattgaccacatgcctcattacaaagcaagtctcaacaaattcaaataaatcagacttatatcaagcgtcttctcagaccacagtggaataaaattaaaaaccaataccaagaggaatgttcaaaattatgcaagtacatggaaactaaacaacttttttagagtgactcctggataaacaataaaaacaaacaagaaataaaaagaagttctttataatgaatgaaaaaatagagatacaacataccaaaatttctgcaatgtagcaaaagcagtaataggaggaaagcttatagtattaagcacgtacatctcatgttctttgcagggagatgaatggagctagaggccattatccttagcaaactaacacaggaacagaaaacaaaattccgcatgttctcacttataagtgggagctaaatgatcagaacacataaacacatagaggggagcaacacacactggggcctatcagagggcgaagggtgggaggagggaaaagttcaggaaaaataactaatgggtactagtttaatacctgggtgatgaaataatctgtacaacaaacccccataacacaagttcacctatgtaacaaatctgcacatgtacccctgaacttaaaagtaaaacaaaaacaaaaacataaaacaattagaaagagcttatagtaacaatgtagtattacacctcaaggaacaagaaaaacaagaaccaatcaaaatcaaagctggcagaaaataaatgagaaagatcagagcaaaactaaatgagattgaagccaaaaaagaatgatacacagaatcaatgaaatgaaaggttgattccttgaaagaattttaaaaattgagagaccattagctaggctaatcatggaaaaaggagagaagattcaaattatcaaatttagaaatgataaaggtgacattataactggtagcacaaaaatacaaaagatcatcagaaactactatgaacacccctatgcatacaaactagataacctagaggaaatggataaattcctggaaacatacagagtcccacgattgaaccaggaagaaatagaaatcctgaacagaccaataacaagtaatgaaattgaaatagtaataaaaaaaaaaatcttccaaaaacaacaacaaaagcccaaggctagatggattcacagctgaattttaccagacatacaaagaacacctcgtaccaatcttaatgaaattatatcaacaacttgagaagagatccctccctaattcattctatgaatccagggtcaccctgacactaaagccaggcaaggccacagtaaaaaaaaacaaacctacaggccaggtgcagtggttcacgcctctaatcccagcactttgggaggccaaggcgggcggatcacgaggtcaggagatcgagaccacggtgaaacctcgtctctaataaaaatacaaaaaattagccgggcgcggtagcaggcgcctgtagtcacagctactcgggaggctgaggcaggagaatggcttgaagccaggaggcggagcttgcagtgaaccgagatcacggcactgccctccagcctgggcgacagagcgagactccgtttcaaaaaaaaaaaaaaaagaaacctacaggccaatacgcatgataaacatagatgcaaaaatcctcaacaaaattcaagcaaaccaaatccaacagcacatcaaaaagataattcatcatgatcccgtggatttgtttcagggatgccagcactgttcaacatatgcaaatcactaaatatgattcaccacataatcagaactgagaacaaacaccatatatgatcatctcaatagatgtaaaagaggatttgataaaatccaatatcccttcatgataaaagtccacaacaaactaagcattgaaggaacatacttcaaaataataagagccatatatgataaacccacagacaatattatgttcaatggggaaaacttgaaagcaattcccccaagatctgaaacaagatgaagatctacactatcaccacactttttcaacatggttctgtaggtcctagccagagaaatcaggaaagaggaagaaataaatggcattcaaattggaaaagaggaagtcaaagtatctctttgttgatgacattattttatacctataaattgactcctctaaaagacttctagacttgatgaactacttcaataaatttgcagaatacaaaagtaataggccgggtgcagtggctcacgcctgtaatcccaacaccttcggaggccaaggcaggcagaccatgaggtcaagagttcgagaccaacatagtgaaaccccgtctctgctaagaagacaaaaagtaactgggcatggtggagcatgcctgtaatcccagctactcaggaggctgaagcagcagaattgatggaacccaggaggcagaggttgcagtgagccgcgatggggccactgtactccagccttggtgacagagcaagactgtctgaaaaaaaataaataaataaaaaacaaaaagaaaccaccttaggctgggtgtggtggctcatgcctgtaatcgctgcactttgagaggccaagacaggtggatcacttgaggtcaggagttcaagaccagcctggccaacatgatgaaaccccgcctctactaaaaatacaaaaattagccgagggtagtggcagacacctgtagtcccagctacttgggaagctgaggcaggagaatcacttgaatcctggaggcggaggttgtagtgagctgagatcataccactgcattccagcctgggtgacagagcaagactccatctaaaaaaaaaaaaaaaagttatgtacaaaaatttgtaacatttctatacaccaataatcttcaagctgagaatgaaatcaagaaatcaatcccatttacaatagccacaaaaaataaaatactgaggaatacatttaactaaaaaggtgaaggctctctaaaaagataactacaaaatcctaattaagaaattgtaggccaggcacggtggctcacgcctgtaatcccagtactttgggagaccgaggcggcggatcacaaggtcaggggatcgaaatcatcctggtttcacctaacatggtgaaaccccatctctactaaaaataaaaaaataaaaaaattagccgggcgtggtggcaggtgcctgcagtcccagctactctggaggctgaggaaggagaatgtcgtgaacctgggaggcagagcttgcagtgagcggagatcgagccactgcacaccagcctgggtgacagtgcgagactccatctcactggaaaggaacaaccggtaccagccgctgcaaaatcataccaaaatgtaaagaccatcgagactaggaagaaactgcatcaactaacgagcaaaatcaccagctaacatcataatgacaggatcaaattcacacataacaatattaactttaaatgtaaatggactaaattctccaattaaaagacacagactggcaaattggataaagagtcaagacccatcagtgtgctgtattcaggaaacccatctcacgggcagagacacacataggctcaaaataaaaggatggaggaagatctaccaagcaaatggaaaacaaaaaaaaggcaggggttgcaatcctagtctcggataaaacagactttaaaccaccaaagatcaaaagagacaaagaaggccattacataatggtaaagggatcaattcaacaagaagagctaactatcctaaatatatatgcacccaatacaggagcacccagattcataaagcaagtcctgagtgacctacaaagagacttagactcccacacattaataatgggagactttaacaccccactgtcaacattagacagatcaacgagacagaaagtcaacaaggatacccaggaattgaactcagctctgcaccaagcggacctaatagacatctacagaactctccaccccaaatcaacagaatatacatttttttcagcaccacaccacacctattccaaaattgaccacatagttggaagtaaagctctcctcagcaaatgtaaaagaacataaattataacaaactatctctcagaccacagtgcaatcaaactagaactcaggattaagaatctcactcaaagctgctcaactacatggaaactgaacaacctgctcctgaatgactactgggtacataacgaaatgaaggcagaaataaaggtgttctttgaaaccaacgagaacaaagacacaacataccagaatctctgggacacattcaaagcagtgtgtagagggaaatttatagcactaaatgcccacaagagaaagcaggaaagatccaaaattgacaccctaacatcacaattaaaagaactagaaaagcaagagcaaacacattcaaaagctagcagaaggcaagaaataactaaaatcagagcagaactgaaggaaatacagacacaaaaaacccttcaaaaaatcaatgaatccaggagctggttttttgaaaggatcaacaaaattgatagatcgctagcaagactaataaagaaaaaaagagagaagaatcaaatagacacaataaaaaatgataaaggggatatcaccactgatcccacagaaatacaaactaccatcagagaatactacaaacacctctatgcaaataaactagaaaatctagaagaaatggataaattcctcgacacatacactctcccaagactaaaccaggaagaagttgaatctctgaatagaccaataacaggagctgaaattgtggcaataatcaatagtttaccaaccaaaaagagtccaggaccagatggattcacagccgaattctaccagaggtacaaggaggaactggtaccattccttctgaaactatttcaatcaatagaaaaagagggaatcctccctaactcattttatgaggccagcatcattctgataccaaagctgggcagagacacaaccaaaaaaagagaattttagaccaatatccttgatgaacattgatgcaaaaatcctcaataaaatactggcaaaacgaatccagcagcacatcaaaaagcttatccaccatgatcaagtgggcttcatccctgggatgcaaggctggttcaatatacgcaaatcaataaatgtaacacagcatataaacagagccaaagacaaaaaccacatgattatctcaatagatgcagaaaaagcctttgacaaaattcaacaacccttcatgctaaaaactctcaataaattaggtattgatgggacgtatttcaaaataataagagctatctatgacaaccccacagccaatatcatactgaatgggcaaaaactggaagcattccctttgaaaactggcacaagacagggatgccctctctcaccactcctattcaacatagtgttggaagttctggccagggcaattaggcaggagaaggaaataaagggtattcaattaggaaaagaggaagtcaaattgtccctgtttgcagacaacatgattgtatatctagaaaaccccattgtctcagcccaaaatctccttaagctgataagcaacttcagcaaagtctcaggatacaaaatcaatgtacaaaaatcacaagcattcttatacaccaacaacagacaaacagagagccaaatcatgagtcaactcccattcacaattgcttcaaagagaataaaatacctaggaatccaacttacaagggatgtgaaggacctcttcaaggagaactacaaaccactgctcaaggaaataaaagaggatacaaacaaatggaaaaacattccatgctcagggggaaggaagaatcaatatcgtgaaaatggccatactgcccaaggtaaattacagattcaatgccatccccatcaagctaccaatgactttcttcacagaattggaaaaaactactttaaagttcatatggaaccaaaaaagagctcacattgccaagtcaattctaaaccaaaagaacaaagctggaggcatcacactacctgacttcaaactatactacaaggctacagtaaccaaaacagcatggtactggtaccaaaacagagatatagatcaatggaacagaacagagccctcagaaataacgcagcatatctacagctatctgatctttgacaaacctgagaaaaacaagcaatggggaaaggattccctatttaataaatggtgctgggaaaactggctagccatatgtagaaagctgaaactggatcccttccttacaccttatacaaaaatgaattcaagatggattaaagatttaaacgttagacctaaaaccataaaaaccctagaagaaaacctaggcattaccattcaggacataggcatgggcaaggacttcatgtccaaaacaccaaaagcaatggcaacaaaagacaaaattgacaaatgggacctagttaaactaaagagcttctgcacagcaaaagaaactaccatcagagtgaacaggcaacctacaaaatgggagaaaattttcgcaacctactcatctgacaaagggctaatatccagaatctacaatgaactcaaacaaatttacaagaaaaaaacaaacaaccccatcaaaaagtgggcaaaggacatgaacagacacttctcaaaagaagacatttatgcagccaaaaaacacatgaaaaaatgctcatcatcactggccatcagagaaatgcaaatcaaaaccactatgagataccatctcacaccagttagaatggcaatcattaaaaagtcaggaaacaacaggtgctggagaggatgtggagaaacaggaacgcttttacactgttggtgggactgtaaactagctcaaccattgtggaagtcagtgtggcgattcctcagggatctagaactagaaataccatttgacccagccatcccattactgggtatatacccaaaggactataaatcatgctgctataaagacacatgcacacgtatgtttattgcggcattattcacaatagcaaagacttggaaccaacccaaatgtccaacaattatagactggattaagaaaatgtggcacatatacaccatggaatactatgcagccataaaaaatgatgagttcgtgtcctttgtagggacatggatgaaattggaaatcatcattctcagtaaactatcacaagaacaaaaaaccacacaccgcatattctcactcataggtgggaattgaacaatgagatcacatggacacaggaaggggaatatcacactctggggactgtggtggggtgggggaaggggggagggatagcattgggagatatacctaatgctagatgacgagttagtgggtgcagcacaccagcatggcacatgtatgcatatgtaactaacctgcacaatgtgcacatgtaccctaaaacttaaagtataataaaaaaattaaaaataaaaaaaaaaagaaattgtaggctgggtgcagtggctcacacctgtaatcccaacactttgggagttcgagctggtggatcacctgaggtcaggagtttgagaccagcctggccaacgtggtgaaaccctgtctctactaaaaatacaaaaattagccaggcatgctggtaggcacttgtaatcccagctactcgaaaggctgaggcaggagaatctcttgaacccaggaggcagaggttgcagtgagcgaagatcgtgccactgcactccagcctggtcaacagagtgagactctgtcttaaaaaaaaaaaaaaagaaggaaattgtagatgagaaacaaatggataaatattccatgtattggaagaattaatatgattaaaatgaccatatcttccaaagcaatctacagattcaatgctatcaccatcaaattactaatttcatttttttcactgaattataaaaaacaatcctaaagttcatatggaaccagaaaagaggccaaatagccaaagcaattataagcaaaatgaacaaatccagaagcattacatggcctgacttcaaattatactacaaaactatggaaactaaaacagcatggtactgttaccaaaatagatacattgatcaaaggaacagaggagagtaaatggaaataaagccacataccttcaaccaactaatatttgacaaaactgtcaaacataagcaatgtggaaataacaccccattcagggtgaatatgcaaagaaaagggaatgcttatacactgctagtgggaatgtagatttattcaactgctatgaaaaacagaataaatatatctcaaggaactaaaaacagagctaccattaaacccagcatccttattactgtatatctacccaaaataaatcattatataacaaacacactgagggatggctggcaagatggctgaaaagaaacagctccagtctgcagctcccagcaagatcaatgcagaagacaggtgatttctgcatttccaactgaggtacctggctcatctcgttgggactggttagagagtgggttcagcccatggagtatgagccgaagcaggatggggcattgcctcacctgggaagtgcaaggggttgaggaactccctctcctagccaagaaaagccttcagggactgtgctgtgaggaacattgcattctggcccagatactatgcttttcccacggtcttcacaacccagagaccaggagattccctccggtgcctatgccaccagggtcctgggtttcaagcacaaaactgggtggccgtttcagaagacaccgagctagcttcaggaggtttttttcataccccagtggcatctggaatgccagcgagacagaaccgttcacacccctggaaagggggctgaagccagggagccaagttgtctagctcagcggatcccacccccacagagcccagcaagctaagatccactggcttgaaattatcgctatcagcacagcagtctgaagtcaccgtgaaatgctcaagcttggtagggggaggggcatccgccattactgaggcttgagtaggcggttttcccctcacggtgtaaacaaagccaccaggaagttcaaactgggcggagcccaccacagctcagcaaagccactatagccagactgcctctctagatgcctcctctctgggcagggcatctctgaaagaaagacagcagcctcagtcagcggcttatagataaaactcccatctccctgggacagagcacctgtgggaaggagcagctgtggcagcagcttcagcagacttaaacgttcctgcctgccagctctgaagagagcagaaaacctcccagcacagcgctcgagctctgctaaaagacagacggcctgcccccataactcctgactgggagacacctaccagcaagggttgacaaatgcctcatacaggagagctccagctggcatctagcaggtgcccctctgggacgaagcttccagaggaagaaacagtaagcaatctttgctgtactgcagcctctgctggtgatatccaggcaaacaggctctggagtggacctaaggcaacctacagcagacctgcagcagaggggcctgagtgttagaaggaaaactaacaaacagaaaggaatagcatcaacatcaacaaaaaggatgtccacacagaaaccccatctgaaggtcaccaacatcaaaggccaaaggtggataaatccacaacgatgaggaaaaaccagtgcaaaaaggctgaaaattccaaaaactagaatgcctcttctccaaaggatcacagctcctcgccagcaagggaataaaactggatggagaatgaatttgacgaattgacagaagtagactttagaaggtgggtaataacaaactcctccaagctaaaggagcatgttctaacccaatgcgaggaagctaagaaccttgaaaaaaggttagaggaattgctaactagaataaccagtttagagaagaacataaatgacctgatggaggtgaaaaacacagcatgagaatttcgtgagcatacacaaatatcaatcgccgaattgatcaagtggaagaaaggataccagagattgaagatcaacttaatgaaataaagtgagaagacaagattagagaaaaaaaaaatgaaaaggaaccaagaaagcctccaagaaatatgggactatgtgaaaagaccaaacctacgtttgattggtgtacctgaaagtgatggggagaatggaaccaagttggaaaacactcttcaggagaacttccccaacctagcaagacaggccaacattcaaattcaggaaatacagagaaaaccacaaagatactcctcgagaagagcaaccccaagacacatagttgtcagatgtgtctgacatttcaaccacggttgaaatgaaggaaaaaatgttaagggcagccagtgagaaaggtcaggttatccacgaagggaagcccatcagactaacagtggatctctctgcagaaaccctacaagccagaagagagtggaagccaatattcaacattcttaaagaaaagaattttcaacccagaatttcatatccagccaaactaagcttcataagcaaaggagaaataaaatccttgacagataagcaaatgctgagggattttgtcaccaccagacctgccttacaagagctcctgaaagaagcactaaacatggaaagaacaactggtaccagccactgcaagaacataccaaactgtaaagaccattgacactatgaagaaactgcatcaacaaacagccaaaataaccagctagcatcttaatgactgccaaaattcacatataacaatattaaccttaaatgtaaatgggctaaatgccccaatttaaaaaaacagactggcaaattggatagagtcaagaaccatcattgtgctgtattcaggagatctatctcatgagcaaagacacacataggctcaaaataaaggggtggaggagtatttatcaagcaaatggaaagcaaaaaaaaaaaaaaaagcaggggttgcaatcctagtctctgataaaacagatattaaaccgaaaaagatcaaaaatgacaaagaagggcattacataatggtaaatggaacaatggaacgagaagagctaacaattgtaaatatatatgcacccaatacaggagcacccagattcataaagcaagttcttagagacctaaaaggagacttagactcccacacaataatagtgggaaactaacacccctttgtcaatattagactgatcaacgagacagaaaattaacaaggatattcagtacttgaactcagctctggaccaagtggacctaatagacatctacagaactctccaccccaaatcaacagagcatacactcttctcagcaccacattgcacttattctaaaattgaccacataattggaagtaaaatactcctcagcaaatgcaaaagaagggaaatcataacagtctctcagagcacagtgcaatcaaattagaacttaggattaggaaactcactcaaaaccacacaactacatggaaactggacaacctgctcctgaatgactacaggataaataacgaaattaaggcagaaataaataagtccaatgagaacaaagacactatgtgccaggatctctgggacacagctaaagcagtgtttagagggaaatctgtagcactaaatgcccacaggagaaagcaggaaagatctaaacaccctaacatcacaatgtaaagaactagagaagcaagagcaaccgaatttgaaagctagcagaagacaagaaataactaagatcagagcagaactgaaggagattgagacacaaaaaaacccttcaagatattaatgaattgccaggcgtggtggcttatgcctgtaatcccagcactttgggagtccaaggcgggcagttcacaaggtctggagttcgagaccagcctgaccaacatggtgaaaccttgtctctactaaaattacaaaaattaactgggcgtggtggcacgtgcctgtagtcccagctactcgggaggctaaggcagaagaactgcttgaacccaggaagcagaggttgcagcgagctgagattgtgccacttcactccaccctgggtgacagagtgagaccttgtctcaaaaaaaaaaaaaaatcaatgattccaggagctggttatttgaaaagattaacaaaatagatagactgctaggcaaactaataaagaagaaaagaaagaagaatcaaatagacacaataaaaaatgataaaggggatatcatcactgatcccacagaaataccaactaacattagcgaatactataaacacctctatacaaataaactagaaactctaaaagaaataaattcctggacacatactctcccaaaactaaaccaggaaaaagttgaattcctgaatagaccaataacaagttctgaaattgaggcagtaattagtagcctaccactcataaaaagcctaggaccagatggattcccagccaaattctaccagaggtacaaaaaggggctggtaccattccttctaaaactattccaaacaatagaaaaagaggggcttctccctaactcattttatgaggccagcatcatcctgataccaaagcctggcagagacacaacaaaaaaagaaaatttctggccaatatccctgatgaacaccgatgcgaaaatcctcaataaaatactggcaaatcaaatccagcagtacatcaaaaagcttatccaccatgatcaagtcagcttcatccctaggatggaaggatggttcaacatatgcaaatcaataaatgtaatccatcacataaacagaaccaatgacaaaaaccacatgattatctcaatagatgcagaaaaggccttagataaaattcaacacccctgcatgctaaaaactctcaataaactaggtattgatggaacgtatctcaaaataacaagagctatttatgacaaacccacaaccaatatcatactgaatgggaaaaagctggaagcattccctttgaaaactggcacaagataatgatgctctctcttaccactcctattcaacatagtattggaagttctggccagggcaatcaggcaaaagaaagcaataaacggtattcaaataggaagagagaaagtaaaattgtccctgtttgcagatgacatgattgtctatttagcaaaccccatcatctcagcgccaaatctcctaaagctgataagcaacttcagcaaagtctcaggatacaaatcaatgtgcaaaaatcacaaccattcctatacaccaataatagacaaacagagacccaatcatgaccaaacttccattcagaattactacaaagagaataaaatacctaggaatgcaacttacaaaggatgtgaaagacctcttcaaggagaactttacaatactatctccatcaagctaccattgacattcttcacagaattaaaaaaaacttctttaaatttcatatgaaaccaaaaaagagcccatatagccaagacaatcctaaacaaaaagaacaaagctggaggcatcacactacctgacttcaaactatactacaagtctacagtaaccaaaacagcatggtactggtaccaaaacaaatatatagaccaatggaacagaacagaggcctcagaaataatgccacacatctacaaccatctggtctttgacaaacctgacaaaaacaagcaatggggaaaggattccctatttaataaatggtgttgggaaaactgcctagcaatatgcagaaaactgaaactggaccctttctttacaccttatacaaaaattaactcaagatggattaaaaacttaaacttaagtcctaaaaccataaaaaccctagaagaaaacctaagcaataccgttcaggacataggcatggggaaagtattcatgactgaaacaccaaaagcaatggcaacaaaaggcaaaatggacaaatgggatctaattaaacctaagagtttctgcacagcaaaagaaactattatcagaatgaacaggcaacctataaaatgggagaaaatttttgcaatctatccatctgaaaaaggactaatatctagaatctacaaggaacttaaacaaatttacaagaaaaaaacaaacaaccccatcaaaaagtgagcaaagtatacgaacaaacacttttcaagagaagacatttatgcaaccaacaaacatatgaaaaaaagctcatcatcactggtcattagagaaatgcaaatcaaaaccacaatgagataccatctcacgccagttagaatagtgatcattaaaaactcaggaaacaacagatgctggagaggatatggagaaataggaacacttttacactgttggtgggagtgtaaattagttcaaccattgtggaagacagtgtggtaattcctctaggatccataaccagaaataccatttgacccagcaatcccattactgggtatatacccaaaggattataaatcattctactataaagacacatgcacacgtatatttattccagcactgttcacaatagcaaagacttggaatcaacccaaatgcccatcaatgatagactggataaagaaaatgtggcacatatatgccatggaatactacgcagccttcaaaaagatgagttcatgtcctttgcagggacatggatgaagctggaaaccatcattctcagaaaactaacacaggaacagaaaaccaaacactgcatgttctcactcataagtgggagttgaacaatgagaacacatggacacagcgagaggaatatcacacaccaggtcctgtcagggggtgggcagctaggggagagatagcattaggaaaaatacctaatgtagatgatgtgttgatgggtgtagcaaaccaccatggtacatgtatacctatgtaacaaacctgcatgttctgcacatgtatctcagaacttaaagtttaataaactacagtaataataaaacagaatcagtccgggcacagtggctcacagctgtaatcccagcactttgggaggccgaagcaggcggatcacctgaggtcaggagttcgagaccagcctggccaacatgatgaaaccctgtctctactaaaaatactaaaattagttggacatggtggcgcacctgtaatcctggctatcctgtaggctgaggtgagaggattgcttgaacctggaggcggaggttgcattgagccgagatcttgacattgcactccagcctgggcaaaagagtgagactccatcttgattaaaacatactccttgtattatatacttatattaaagtattcttttgtaagtaaaaaaaaaaaaaacatagtaataagaaaatagaatgatgccgggcacggtggctcacgcctgtaattccagcacttttggaggccgaggcaggcagagtacgagatcaggaattcgagaccagcctggccaacatagtgaaacccggtctctgctaacaaaatacaaaaattagtcaggtgtggtagcacgtgcctgcagtcccagctgctcaggaggctgaggagggagaattgcttgaacctgggaggcagaggttgcagtgagccaagaccacaccattgtactccaacctgggtgacagagtgagacccagatagagatattatcacaaatacagcaaaatgttagtgtaaaatctaggagctgagtttatggatattcactatagagtttttattgaattttctatatgtttgcccattttcataataaatgttggaggaaaatagaaaacacacacacacacacacacacacacctgctgggcatggtggctcacgcctgtaatcccagcactttgggagcccaaggtgggcgaatcacctgagatcaggagttcgaccagcctgaccaacatggagaaaccccatctctactaaaaatacaaaaaaaaaaaattagcaaggcgtggtggcacattattgtaatcccagctactcaagaggctgaggcaagagaatcacttgaacctgggaggcggaggttgcagtaagctgagatcacaacattgcactcctaggcaacaagagcgaaaactccatcaaaaaaaattttttaatttaaaaaacccaaaacacctacactgacatgtgtatcacagaactattcacaatagcaaagtcatagaaccaacctaagtgtccatcagtggttgactagataaagaaaatgtggtacatatatgccatggaatattatgcagccataaaaacaataaattcatgtcttttgcagcaacctggttatacctggaggtcattatcctaagtaaactaactctgaagcagaaaatcaaatatcacatgtactcagttataagcaggaactaaacgatgaatacacatggacataaagatggaaataatagacactgggggctcaaaaaaaaggggagagtgggagggataaagattgaaaggttacctgttggatacaatgttcaatatttgggtaatgagtacactagaagcccaatccccacaattatgcaatatacccatgtaacaaatatgatgggtacttgctgaatctaaaatttttaaaaagatgaaaatcaaaaagtttattgaaacgaatgaaaatggaaacacaggccaggcatggtggctcacgtttgtaatcccagcacttcgggaggccgaggcgggtggatcactaggtcaggagttcaagaccagcctggccaagatggtgaaatctcatctctactaaaaatacaaaaattaactgggtgtggtggtgggcgcctgtaatcccagctactcgggaggctgaggcacaagaactgcttgaaccccagaggcagaggttacagtgagccgagatggagccactgcactccagcttgggcgacagagtgaggctcagtctcaacaaaaaaaaaaagaaaaaagaaaaaagaaaaagacataaatagacatttctcaaaagaagacacacaatcaatgggtatatgataaaatgtttggccaggcgtggtggctcacgcctgtaatcccaccactttgggaggccaagggggcgcggatcaccaggtcaggagttcgagagcagcctgaccaacatagcgaaaccccaactctactaaaaatacaaaaattagctggatgtggtggcgtgcacctgtaatcccagctactcaggaggctgaggcaggagaatcgcttgaacccgggaagcagaggttgcagtgagcctagactgtgccactgcgctccagcctgggctacagagggagactctgagactccatctcaagaaaaaaaaagtttaacatcactaattatcggagaaatacaaatcaaaaccacaatgtgatattatcttatcttattcagaatggctattatgaaaaggacaaaaaatttaaaaatgttgattaatatgtggagaaaagaaacacttatacagtgttattgggaatgtaaactagtacagccactgtgaaaaacagcatggggatttctcaaaaaataaaattttcatttgatccagcaatcccactactgggtatttaaccaaagggaaagaaatcactacatcaaagagatacctgcactcacatgtttattgcagcacattatcacaatattatttctttcaaaccaggagcatggaacgtctttttatttgtgtatgtgtgtgtgtgtgtgtgtgtgtgtgtgtgtactcttcaatttctttcatcagggttttgtagtttttattgtaaagttctttcacctccttggttgaatttattcctagctatttaattttttagagctactgtaatggtattgctttcttgatttgcttttcggctagtttgctattgattattattgatatatggaaacactagtgatttttttttttttgagacagagtttcactctcattggccaggctagagtgcaatggtgcgatctcggctcactgcaacctccacctcctgggttcaagcgattctcctgcttcagcctccaagtagctaggattacaggtgcccaccagcacacccagctatttttttgtatcttttagtagagacaagtttcaccatgtttgtcaggctggtctcaaactcctgacctcaggtgatacacccatctcggcctcccaaagtgctgggattacaggcgagagccactgcgccttgccaacactagtgatttttgtatgttaattttgtatcgtgttcctttactaaatttttaaaatcacttctaagacatttttggtggagtctttcagttattctagatataagatcatgtaatcttcaaagagaaacaattctcattgccaatttggatgccctttatttctttctcttacctagtggctctggctaggatttcaagcagtatattgaataaaagtggtgaaagtggacatccttttcttcttccagttctcagaggaatgactttcatcttttcccctttcagtgtggtgttagctgtgggtttgtcatatacaatcattattttgaggaatgttctttctttttctttctttttttttttttttttttttttttgagatggagtttcgctcttgttgtccaggctggagtgcaatggtgtgatctcggctcactgcaacctctgcctcctgggttcaagcgattgtcctgcctcagcctcccgagtagctgggattacaggcatgtgccaccacacacggctaattttgtatttttagtagaaacagttttctccatgctgatcaggctgggctcaaactcctgacctcagttaatccgcctgcctcggcctcccaaagtgctgggattactggcgcgagccacctcgcccggctgaggaatgttctttgtatacctagtttatgaagagtttttatcatgaaggaatgttgaattttattaaatgctttttctgcatctattgagaaaatcatttagtttctgtcctttattctgttgatgtgatgtaccacatttattgatttgcttacgttgtaccacacaagattataaattttgttatgtgtatttatcataataaaaacatttttttttgagacagtcttactctgtctcccaggctggagtgcagtggtgggatctcggctcactgcaacctccgtctccatctcctgagttcaagtggttctcctgcctcagcctcccaagtagctgggattacaggcatgctctaccacacctgactaatttttgtatttttaatagagagagggtttcaccatgttggccaggctggtatcgagctcctgacctcaggtgatctgcctgcctcggcctcccaaagtgctgagattacaggtgtgagccactacacccagcctaaagacaatttttaaaccccactatacataggagaaagaactttacaatgaaaactacaaaagcttgaatgaaagaaattgaagaggacacacacacacacacacacacacacacacacacacacaaataaataaataaacacccacactcagggtttgaaagaaatttatatatctataaatatatatatataacatgtataatatgtattctgcatcagaatagcatacatcacaaaggtagtcagtatggaatttgacgctttttataagtttttgtccttattactggtgttcctgtctcccacctcctataactccagagtttgtctttttttttttttttgagatggagtctccctccgttgcccaggctggagtgcagtggtgcaatctcggctcaccacaacctccacctcctgggttcaagcgattcttctgcctcagcctcccgagcagctggaactacaggcgtgtgccaccatgcccaaataatttttgtatttttattagagacagggtttcagtatgttggccaggctggtctagaactcctgacctcgtgatccacctgcctcagcctcccaaagtgctaggattacaggcatgagccactgtgcccagccagagtttgtatttcattccagttacatatagtgaatttaaataaacacatctctaggattggactcctgatcataggatactccaggaccctgaaagctaggtcaggtctagacctaacagatgttaaagtatgcctccagctgataggcaaaatgattccccatggctacttgagatgctcaaagttcaaaaagaaccaggcagttatggctttgtgtgggagcagtcatgcactctgttctcagaaagatgtaaaagtatcacaagacctccctttctgtaatcaagccaatccagttccttttttggtgccaagataaactatggccaaagctcctcccccaaccagtaatttgaaaaaaacatttgacagagacttctggttttggtcttggaaaccgtatcagttcatttatgtgttgctgtaaagaaatacctgaagctggccagacgcagtggctcacgcctgtaatcccagcactttggaagacagaggcgggcggatcacgaggtcaggaggttgagaccaccctggctaatgcggtgaaaccccgtctctactaaaaatacaaaaaattagccgggtgtggtggcgggcgcctgtagtcccagttactcaggaggctgaggcaggagaatggcgtgaacccaggaggcggagcttgcagtgagcagagatggtgccactgcactccagcctgggcgacagagcgagactccatctcaaaaaaaaaaaaagaaatacctgaagctgggtaatttataaagaaaagaggtttgtttagctgtcagttctgcaggctgtacataaagcatagtgtcatcatttgctcctgctgagggcctcaggaagcttacaatcatggcaaatagtgaaagggagccagcatcaaatggcgagagagggagaggatggtgtcaggcccctttaaacaaccagctttcacatgaattcagagtgagaactcattcattaccatgaggaaaacaccaagccataaatgaggactccacccccatgaccccagacatcttccactaggcccacctccaacattggaggtgatatggtttggctctgtgtcaccatgcaaatctcaccttgagttgtaataatccccacgtgtcctgggagagacacaatgggaggtaattaaatcatgggggcaggtttttcccatgttgttctcatgatagtgaataagtctcacaagatctgatggttttataaaggggagttcccctgcacatgctctcttgtctgccaccatgtaagatgcgacttttctcctcatttgccttctgccatgattgtgaagcctccccagctatgtggaactatgagtcaattatacctctttcctttataaattacccgatctcaggtatgtctttattagcagcatgaaaatggactaatacagtaaattggtaccagtagagtggggtgctgctataaagattcctgaaaatgtggaagagactttggaactgggtaacaagcagaggtcggaacagtttggagggctcagaggaagacaggaaaatgtgggaaagtttgcaacttcctagagacttggagggctcagtaaacagaaagaagcgggaaagtttggaacttcctagagacttgttgaatggctttaaccaaaatagtgacagtgatatagacaataaagtccaggctgagttggtctcagaaggagatgaggaattcgtttggaactggagtaaaggccactcttgctgtgcaaaaagactagcagtattttgcccttgccctacagatctgtggaacttttaacttgagagagatgatttagattatctggcaggagaaatgtataagcagcaaagcattcaagaagaagcagcacataaaagtttggaaaatttgcagcctgacaatgcaatagaaaagaaaaacccattttctggggagaaattcaagcctgctgcagaaatatgcataaataacaaggagccgaatgctaatcatgaagacaatggggaaaatgtctccagagtatgccagatacctttgcagtagcccctcctatcacaggctcagaggcctaggagaaaaaaatggtttcatgggctggactcaggggccccctgctgtgtgcagtctagagacttgttgccccatgtcccagctgctccagccatggctaaagggggccaaggtacagcttgggctgtggctttggaggctgcaagccccaggccttggcagcttccatgtggtgttgagcctgtgggtgcacagaagtcaagaattgaggtttggaaacctctgcctagatttcagaggatgtgtggaaatgcctggatgtccaggcagaagtttgctgcaagggtggggacctcatggagaacctctgctagggcagagcagaaggaaaatgtgtgattggagcccctatacagagtctccactggggaactgcctagtggagctgtgagaagagggccatcgtcctccagacctcaaaatggtagatccaccaacagcttgcactatgcatctggaaaagccacagacactcaacagcaacctgtgaaagcagtcaggagtggggctgtaccctgcaaagccacaggaactgagctgcccaagaccatgggaacccacctcttacatcagcatgacctagatatgagacatgtagccacaatagatcatttgggagttttaagatttgactgccccattggatttcagacttgcatgaggcctgcagccccttcattctggccaatttctcccatttggaatgggtgtatttatccaatgcctgtacctcccattgtatctaggaagtaactaatttgcttttgattttataggctcacaggtggaagggacttgccttgtctcagatgagactttggatttcggacttttgagttaatgctgaaatgagttaagataggaattccactaaacctataaatcaatttggggataattgacatctttactatgttgaattttctaattcatgaatattgttaatgtttctaattatttagctcttttaaaatttctttcatcagcattgtttaattttcagcatataggtccagtacatgttaagtttatacgtgagtgtgatttcattttccttggaatggttgtaaatgttgtgtttttaatttcagtatttacatattcattgtcagtatgtagaaattcagttgatatttgtatgttgattttgtagtctgtgacattgctgaactcattaattctatgaaattttttggagattctttggaattttctacatagaaaagcatgttggctggcagcagtgactcacccctctaatcctaacttccagctgcatccatattgctgcaaaggacatggttttattcttttatatggctgcatagtattccatggtgtatatgtgcattttctttatccaatctaccattgatgggcacctaggttgatcccatgtctttgctattgtgaatagtgctgagataaacatatgagtgcaggtgtctttttggtagatgatttgtttcctttgggtatatactcattaatggattgctggctcgaatggtagtcctatttttttctacttggagaaatctccaaaatactttccacagtggctaaactaatttacatccccaccaacagtgtataagcactccctttctctacaacctttttactttttaataattaatagccattctgatttgtgtgagctggtatttcattgtcattttgatttgtatctctctgatgattagtgatgttgaactttgttgttttttcttttttagaccgagtcttgccctgtcaccaggctggagtgcagtggtgcgatcttggctcactgcaacctttgcctcctgggttcaagtgattctcctgcctcagtctcccgagtagcagagactacaggcatgagccactacaccctgttaatttttgtatttttagtagtgatggggtttcaccatgtcggccaggatggactggatctcttgacctcgtgattcgcccaccttggcctcccaaagttctgggattacaggcatgagccaccgcgcctggcctgaactttttttaatatgtttgctggccacttgaatgtattcttttgagaagggtctgttcatgttttttgcccacattttaatggggttgtcttttacttgttgatttaagtttcttatagatcctggatattagtcctttgccagaatcatagtttgtaaatattttatcccattttttctgtttactctgttggtaatttattttgctgtgcagaagctctttagtttaattaggtcccacttgttcaatttttggttttattgcatttgtttttaagaacctagtgataattttttttttttttttgcctagaccaatatcaaagagagtatttcctaggttttcttccaggatttttataattttagatcttatattgaagtatttaatctatcttgagctaattttcatacatgctgatagataggggtccagtttcaatcttctgcatatggctacccagtttttccaacaccatttattgaatagggtgtcctttccccattgtttatacatgttgagtttgtcaaagatcagttggttgtagctatgtgactttatttccgggttctctattatgttctattggtccatgtgtctattttcgtaccagtaccatttgtttttggttacttgtagtattgtttgaagttgggtagtgtgatccctccagctttattctttttattttatttatttattttttttgtgtgagacggagtctcactctgtcgcccaggctgaagggcagtggcacgatctcggctcactgcaagctccgcctccctccggctttattctttttcatagaattggcttggctattccagctcttttttggttccatatgaattttagaataggtttttcctgattctgtaaaaacgacattggctatttgataggaatagtgttgaatctctatattgccttgggcaatatggacatttcaatgatactaattcctccaacccatgagcatggaatacttttccaattgtctgtgctgtctgtgattattttcagcagtgttttgtagttcttctcatggagatctttcactgccttcgttaggtgtattcctatgtattgttgtatatgtgtgtgtgcctattgtaaatgggattgcattcttgatttgtttctgagcttaaacattattggtatatagaaatgctatagatttttgtacattgattttgtatcctgagactttacagaagtcatttatcaggcctaggagtttttggggggaatatttaggattttctaggtatagaattatatcattagcaaagagataatttgaatttgacttcctctttttttatttagacaccttttatttcttttctttttttttttttttgctgagacagagtctggctgtctcccaggctagagtgcagtggcatgatctctgctcactgcaagctccacctcccgggtttatgccattctcctgtctcagtctcccgagtagctgggacaacaggcacctgccaccacacccagctaattttttgtatttttagtagaggcggggtttcactgtgttagctaggatggtctccatctcctgacctcttgatccacccgcctcggcctcccaaagtgctgggattacaggcgtgagccaccacgcctggctgacaccttttatttctttctcttgcctgattcctctggctaggacttatagtactatgttgaataggtgtggcaagagtgtgcatccttgtcttgttccagttcttagaggtaatgcttccaacttttgcctattcagcatgatgttggctgtgggtttgtcatagatggctcctattattttgagatacggtcttttaatgactggtttgttgagggtttttattattaaggaatgttgaattttatcaaatgctttttctgtgtctgttgaaaggatcatatggttttcgttttaaattttgtttatgtggtgaagcacatttgttaatttgcatatgctgaaccattcttgcatccaaggaataaagcccacttgatcatggtgaattaactttttgatttggtttggtagtgttttttgaggatttttgcatctgtgtttattggggatattggcctgtagttttcttcttttgttatgtctttgtcagattcacgtctatgcttttacatgcaatgtaatcccttccatttcaatcaaatgtaatcccttccatttcaatcaaaagaccaattcaagtcttacttcctccttttagcagtctctgataaccacatcatacgtgattgttcctttctctcaactcttctagcattttgactactaggatgcttacagtgctgtatctttgagagcagaggctatagcttattcttacatgaatatgtcattggctccagtcccagtgcttggcacagagcagacactctttaataaagaaatgaattttattcagcttttttcccatcttatttcttaccagaaatacaaattgtatgagtttcagaaaaatggtatttcggtcaaagtgacaggctcactaaaagacaataatgcatttcattgaaaagcaggatatattttttatttaatgactcttcctctgacatctacttgtgacagaaaatgttaaaatttagtacccaaacactaccctacacacatgcatgcatatacacacatttatgggaatttagctgttaccatgctagagaatgatattgggtgggttttttttgggtgggggggacttttctttgtttttgagacagggtcttactctttcactcagactggagtgcagtggcacaatcacggctcattgcagcctcaacctcctgggctcaagccatcttcccacttcagcctctcaagtagctgggactacaagtgcacgccaccctgcctagctaatttttgtaatttttgtagagatgggacttcaccatgttgctcaggctggtctcaaactcctgggctcaagcaatccacccaccttagcttcccaaagtgctgggattgtaggcatgagccactgtgcctggctagagatattaacatgctatctttttttctctctctctttttctcttttgagacagagtttcactgttgttgtccatgctggagtgcaatggcgtgatctcggctcaccgcaacctctgcctcccaggttcaagcaattctcttgccttagcctcccgagtagctgggattacaggcatgtgccaccacgcccagctaattttgtatttttagtagagacagggtttctccacattggtcaggctggtcttgaactcctgacctcaggtgatccgccctcctcagcctcccaaaatgctgggattacaggcgtgagccaccgtacttggccttaacatgctgtcttgcgcctagctttctttttcattttatcatgaatagcccatagagtcaacctgggtgatggaggaaagaggttaggcagagaaaaatagctaacaaacagaagcaagaaaacataacaggagttggggaaacagagacaatgtgaattcagaaccattagaccatgacatcgagttgtgtaccagttttggagaggaggccactgggaacatcttgaggaaaaaaagggaaaatcaaaccaaatctcagaagcaatgtcatatcttgaacttcacaaataaatgtataagatggagaggaggaaagaaaacacctaaagactaagccacaagtgaggtatttcctgacgtactgagcagtagggggacccaatcccaccttctctaagctaaaggccaatatggtcagatggggaggcatcaggtggtatgaagggatggattctttcagagggtttttgcttccataagaaataacaaaaaagaccacaaaactgcaaatttagaaataatcaagaaatttagtgacacaggaagaggaggtttctttttttttctttttttttttttttgagatggagtcttgctctgtggcctaagctggagtgcagtggcacaatctcagctcactgcagcctccacatcccaggttccagcgattcttctgcttcagcctcccaggcagctgggattacaggcacgcagcaccacgcccagctaatgtttttcttttgtattttttagtagagatggggtttcatcatgttggccaggctgatctcaaactcctgacctcaggtgatccgcccacctcagcctcccaaagtgctaggattaca

SEQ ID NO: 40 - DNA, 16 bp, Homo sapien
  misc_feature (3)..(4): n is a, c, g, or t
  misc_feature (6)..(7): n is a, c, g, or t
  misc_feature (10)..(10): n is a, c, g, or t
gcnncnnggnggcagg

SEQ ID NO: 41 - DNA, 34 bp, Artificial
  synthetic
ataacttcgtataatgtatgctatacgaagttat

SEQ ID NO: 42 - DNA, 34 bp, Artificial
  synthetic
tattgaagcatattacatacgatatgcttcaata

SEQ ID NO: 43 - DNA, 300 bp, Homo sapien
gtaggtctctgaactggcccccctggggcgtacctgtctcttatggttgagactgcaggggtgaaataaactccagtctcccatagcgctcccaggcttattagaaaaaggaaattcccacctaataaattttggtcagaccggttgatctcaaaaccctgtctcctgataagatattatcaatgacagtggtgccctaaacttcgttagcaattttaatttcaccttggtcctgtggtcctgtgatctcaccctgcctccacttgccttgtgatattctattaccctgttaagtacttg

SEQ ID NO: 44 - DNA, 27 bp, Homo sapien
gtgatcagccagctacctggtggcagg

SEQ ID NO: 45 - DNA, 27 bp, Mus musculus
gtgaccagccagcaacctggtggcagg

SEQ ID NO: 46 - DNA, 200 bp, Artificial Sequence
  synthetic
acgggggacttgggctatcactaaaatgcctgccaccagggatctgggaggtcactaaaatgcctgccaccggggatctgggctatcactaaaatgtctgccactggggatctggaagatcgctaaaatgcctgccaccggggacctgggctatcactaaaatgcctgccaccggggacctgggctatcactaaaatgtc

SEQ ID NO: 47 - DNA, 21 bp, Artificial
  synthetic
ctctggccacctgtctagctg

SEQ ID NO: 48 - DNA, 20 bp, Artificial
  synthetic
taggtacctaggcagattgc

SEQ ID NO: 49 - DNA, 21 bp, Artificial
  synthetic
ggctgaaggtgctgtagcaag

SEQ ID NO: 50 - DNA, 22 bp, Artificial
  synthetic
ctgagctcgaacattgccccac

SEQ ID NO: 51 - DNA, 23 bp, Artificial
  synthetic
ctaacaagtgtgagccacctgcc

SEQ ID NO: 52 - DNA, 22 bp, Artificial
  synthetic
ccacctgtctagctggctatca

SEQ ID NO: 53 - DNA, 20 bp, Artificial
  synthetic
ttagccacctctcccctgtc

SEQ ID NO: 54 - DNA, 24 bp, Artificial
  synthetic
tgtccggtgccctgaatgaactgc

SEQ ID NO: 55 - DNA, 24 bp, Artificial
  synthetic
acgttgtcactgaagcgggaaggg

SEQ ID NO: 56 - DNA, 24 bp, Artificial
  synthetic
gtttccaggaggggttcaggttta

SEQ ID NO: 57 - DNA, 24 bp, Artificial
  synthetic
cacaaacccaaacacagataaatg

SEQ ID NO: 58 - DNA, 24 bp, Artificial
  synthetic
ttcatacacaggacatctacacaa

SEQ ID NO: 59 - DNA, 24 bp, Artificial
  synthetic
taaaatacaatccaccagtcatac

SEQ ID NO: 60 - DNA, 24 bp, Artificial
  synthetic
gcaaggtccagggtgaagaataaa

SEQ ID NO: 61 - DNA, 24 bp, Artificial
  synthetic
attttgatttcctccttgggtctt

SEQ ID NO: 62 - DNA, 44 bp, Artificial
  synthetic
gaagttcctattctctagaaagtataggaacttcggatccagct

SEQ ID NO: 63 - DNA, 44 bp, Artificial
  synthetic
ggatccgaagttcctatactttctagagaataggaacttcagct

SEQ ID NO: 64 - DNA, 42 bp, Artificial
  synthetic
ccgggagttcctattctctagaagtataggaacttcggatcc

SEQ ID NO: 65 - DNA, 44 bp, Artificial
  synthetic
ccggggatccgaagttcctatactttctagagaataggaacttc

SEQ ID NO: 66 - DNA, 23 bp, Artificial
  synthetic
cacatgagggcatagccgcattc

SEQ ID NO: 67 - DNA, 24 bp, Artificial
  synthetic
cctggcataagaaatcttgaggat

SEQ ID NO: 68 - DNA, 29 bp, Artificial Sequence
  Synthetic
gatagcttacatacatgccacgttcccgg

SEQ ID NO: 69 - DNA, 27 bp, Artificial Sequence
  Synthetic
ggatgcctgggactgggaaactttact

SEQ ID NO: 70 - DNA, 22 bp, Artificial
  synthetic
tcaagaacgaaagtcggaggtt

SEQ ID NO: 71 - DNA, 21 bp, Artificial
  synthetic
ggacatctaagggcatcacag

SEQ ID NO: 72 - DNA, 21 bp, Artificial
  synthetic
aagcgactcaccctggctgac

SEQ ID NO: 73 - DNA, 21 bp, Artificial
  synthetic
gactatgccatcactcgctgc

SEQ ID NO: 74 - DNA, 20 bp, Artificial
  synthetic
cttcaccaggaagcccacat

SEQ ID NO: 75 - DNA, 19 bp, Artificial
  synthetic
gccaaacatgtgcaggaaa

SEQ ID NO: 76 - DNA, 20 bp, Artificial
  synthetic
gctacctgtgtctctgtatc

SEQ ID NO: 77 - DNA, 21 bp, Artificial
  synthetic
acacacacaagcgcaagaaag

SEQ ID NO: 78 - DNA, 20 bp, Artificial
  synthetic
aatgcctgcgtagtcccgaa

SEQ ID NO: 79 - DNA, 20 bp, Artificial
  synthetic
cgggaacgtggcatgtatgt

SEQ ID NO: 80 - DNA, 18 bp, Artificial
  synthetic
gatcccgcgcctcaagag

SEQ ID NO: 81 - DNA, 19 bp, Artificial
  synthetic
tgggaccgagtggagcacg

SEQ ID NO: 82 - DNA, 20 bp, Artificial
  synthetic
atgagagcatcagatctccc

SEQ ID NO: 83 - DNA, 21 bp, Artificial
  synthetic
tcacataccagcaaagctttg

SEQ ID NO: 84 - DNA, 20 bp, Artificial
  synthetic
atcgccattccaagcataag

SEQ ID NO: 85 - DNA, 20 bp, Artificial
  synthetic
ccacagtgtccaatttgtgc

SEQ ID NO: 86 - DNA, 24 bp, Artificial
  synthetic
aggtggcagtgcatacgcatacat

SEQ ID NO: 87 - DNA, 24 bp, Artificial
  synthetic
ggagagcgcatgcttgcaattcta

SEQ ID NO: 88 - DNA, 20 bp, Artificial
  synthetic
cagtggcaggcagagctttg

SEQ ID NO: 89 - DNA, 21 bp, Artificial
  synthetic
gagcaaacaatggcactaagg

SEQ ID NO: 90 - DNA, 27 bp, Artificial
  synthetic
  misc_feature (6)..(7): n is a, c, g, or t
gtgaynncccagrtccccggtggcagg

SEQ ID NO: 91 - DNA, 94459 bp, Mus musculus
  misc_feature (56015)..(56015): n is a, c, g, or t
acaaacttttttaaaaagtcctttcaaggctggcacgatggctcagtaggtaaaaggttcttgccaacaagccagacagcctgagctgggtcctgagagccatacagtggctgactcctgcagggcatacgatgtagtcacatacacagatagataaataagtacatatgtgtaacagatactttctaaataagctaagctcaaaaaaggcaacactgtagatcatctcctcgtactgcaaagtggtagctgaccatagagctggaagtcaggtttggatgaggaagaggacaccagagttccagtcatccaaaccggggtggatgtgcttccatggcgctagctggtgcaggccactccatgagaacacaaaaggcctgtaggggcaagcttaaggtgacaatctgagtaagccttctcggaataaccgttctgaaataaaattatattcatctgagagagagatggtgtttttaatttattgtcacaatatgaaatcaattttgttctttaaaaagaaaaaaaaacagaattgcctgcatcatagagtgactacagttatatccactagatttttttttagaggagaggaataaagcataagatagtaggaaatgctgttccataagcactcccaggcagtgaggtaaatggtcctgttttttcaaagtatacacattgttaagccaacagtgcttaaatgcttaaagaatgcaattaatactcttgttttgcctgcagtcttaccaggagatatgaacaatagctgcactttctgagtgcctaaagtagctttatggttgttacctcatttattctcgagattttttttctagcaaaaggaaagagattatagcctgttcataggaggaaccaatgttacgcagtcaggacagaataggggcctgagaagtctggcccctcccgggattctgcgaggccttagctcaggtagaaggtcttgtgctgagaaagtcctgctagatagaaacgatctttaactgttacttggtgattccctgcaatgaaaaggaagttaagtgcttctgtttgggacacataaatctttacatagtaacttggcaccttgttttttttaaaagaacagcaaaggactgcaggaggaataaccggtaggatacctgcttaccatgggctagcccctgcttccagccctggttctgaaaaaaggggagaggaaggaagcagggaaacagaatagctctgagaaactcaagacccgaagatcattgacgtttccctcaacacgctgcagattatcctttatttgtaatccatgtgtaagaaaactgaggctctccatgcacatctgatcagagaactcaggcaaccacttttctatctctacatctgagatgtgatttacactttttttccaaagtattctagataagaaattccttccaaattagaacttcgatttccagtgcctatatcagggcaggaaagatggcttaatggttaagagcactggctgctctccaagaggtcttgagttcaagcctcagcaaccacatggtggctcgtggccatctatataatgggatcctgatgccctcttctggcctgcagggatacatgcagacaaccctcacccataaaatatattaattaatacaatacaataaattaattaaaaacaaaaactatgccatttcaccttatatatgaggaattgtaattaagtaaatgagttgactttagctggtactatacacagtttaatcccagcagttggaatgctgagacaggcagatttctgttgactcaaggacaagactggtgtacagagttctaggacagttaagtctgcacagactctgtcttgataaaaaaaaagggggggggggaatggttcagtagttaagagcactagttgttcttccagaggtcctaaattcaattcctagcaaccatacggcgactcatttttagtgagatctggtgccctcttctggcctacaggcatacatacaggcagaacactacataaataagtaaatcttttttaagaagattaaatgatattatctgtggtttttcccagacatggcatgaagtagaagcaagtcttctgatttagctttaaaatgttttctcatttcaattttatagcatgagtctctcaatttatttttcattattatttttattaggtattttctgcatttacatttccaatgctatcccaaaagtccctcccccctcccctacccacccactccccttcttggctctggtattcccctgtactgaggcatatacccatggaaggagttacagagacaaagtttggagctgagatgaaatgatggaccatctagagactgccatatccggggatccatcccataatcagcctccaaacgctgacaccattgcatacactctcactttatttttatattaacccccagaaatgttacttaattggaattcctggtacccaatgactgccagtatatcacattgttagcagtgtagatggaaagtggagcccattttccctatataaactacattttaagttctacagtttcaaaactggtcattgttagcaagaatagccagtttatggagtaagtaattaacttacaggtgccacaattctaggaaagcttatctgcgtaatgttttcacagttatagtgctgaactgaatctttatagcatccattaatacctatgtttgtgaattctaagacatccctgttaaaagtaaaacacacacatgtgtgaagagtgaagcttttagatttgtgatgtcacacatcattgtgtagctttcattttacagcaatttatctttttaccaccatcacaagttttatttttatagccagatgctgaaattgttcacatgagttttccatctgctcctttctaaatgacatggtatcatcttgttaatccagaaatatgattttactgaaagcatactatttttagtgttcctttgaattatgtaagttgcaagaagaattttggtgcaaatcttaactcacatgggtcacactcatgcttttgagtgggctctatcattgtttatagagaaacacaagcaactatttcaggaacagaggtaattaactagaaatatgaaatttgtgtgaagggtttttcaaccttcaaaactcggagtacttatgagtcttatgtgggctgaacactgatagatagctttaaaccagataccacttttttgttaatgcaaacaatagccggtttaactattatattacagatttgccagaaagaaaaggtattaagagagtttatttcaaagtaattggggattattatcaatgcctgcttgaattgcatttcctctgggtagttgtttgggttttagtcttatcttacgcttctaaccaaagcccagctttgagtcagggtgcctgaagactgtgagcaccattgccttaacaagaatgtttgctaacaaaagtgtttgatgggtttccattccaatcagtcctgttgctttccatttattgttggtcatttcagaacattgtgaatattatgcgaagttcttgaaccatgaaattgtattgctttactcgctaagtcttccaagagtatatgatacagatgtatggagagactatattgagacattgaaatatttgggataaggcgtcttccttaggattagaggtagtggggagctgttcacaaatccttaaagagagtccccctattttaggtggctccagaagaatttaagaccagcattggccgtgtgaactcatgcttgaaaaaggctctccctgtcaatgtgaaatggctgctgtgtggatgtctctgctgctgctgtaccctggggtgcagcctgtggcccgtgatttgtctcaacaaaagagtaagtataaccagcctattatatgaaaataaaaagagctgacatttattaacacttattatgtgttagaactgtttccatgatttatttaactctcagaacactgctgtctttattttaatgctaaagaaattatggaaagagaaagtcacttgtttagcctttaccaatagtttattacttaatatgagtttacaccattttcaataaatgcaatttaatttatatattcaaatatatatggattacttttttaaaaaaaggaaaacccaaaaggatgacttaaaataattctgagctacagcagaagccaaccagaaggaccagcaatcctcaaaggtgaagaaagctcttacccttgaacacgtcatagtaacatttctttctagttgtgtcatgaatttaggacactacctcaattttgtctactttaaaatttcatttttatttcaggtctgttttctccagttcgggaggacatctttgaaaagtacgattaacaggctgggatcagtgatagagtgatgttcagtttccagtaatgaaaaagaaatgtgatgaaaggggctggagagatgggtaacagccctctctgcacaagcatgtgcgcttaaatcccagcactcatgtcacaagctaggcctgggtgaaaacagaagggtcacgaggcttgctggccatcagcaggagactgactgtaacgggttctggtgccctcttctggcccacaggcatacatgcaggtagaacactgtatacataagaaatacaattttttaaaagatttatttatttattattatatctaagtacactgtagctgtcttcagatgcaccagaaaaggacatcagatctcgttacggatggttgtgagccaccatgtggttgctgggatttgaactcaggaccttaagaagagcagtcggtgctcttaaccactgacccatctctccagcccaagaaatacaatttttaaaaagatttactatatctaagtacactatagctgtcttcagacactccagaagagggagtcagatcttgttacagatggttgtgagccactatgtgcttgctaggatttgaactcagggcctttggaagctgagccatctctccagccccagaaataaataaatttttaaggaaaaaaataccctcacacttctacatacctggcctgagcttatcttagactctagcccaggaaggctttgagctcatggttgttttttgtttgtttgatttttgttttgttttttgcttcggtctcctaagcaactgggattataggtgtgtgttaccaggtgctgctccactctgactttttggaagtagactactgattcctttaataaccaccagtagctcagagctttgctttaaatatagtttaatttgcttgtcaatacaagcatagtattttcaactggctttctacaagtgttaaaagagataacaacatcattttttaattgtatcttttagaagttataatcactaacttccatgatgttattttaaaacctcaatgtgaattacatgatttggatttcccatcctgagtgtagccagtctcaatcactaagaaacaaagttttgggttttaatgttatcaaggatatttctccacgcctttaatcccagcactcaggaggcagaggcaagtggatttctgaattcgaggccaccctgatctacagagtgagttccaggacagccagggctatacagagaaactctgtctcaaaaaaccaaaaaagaaaaagaaaaaaaagatatttctctcctgtgacttatttatgctttgtccatctcaataactgcaccaaagggactgaaacagaaacgtgctttcaagtcatgtgtttgtgctgagtattctaataggatagtcagtgaaagctgagatgatgctgattctctgatatccttctttctgttgttgctttgttttaactaaagagtttatcctagggacagcagggtggttccgctaggaaaggtacttggtgacaagcctgccaagtctggagttcaatctccagacccatatggtagaagagagaaccaactcccacatgtagactccgatctccacttgcatgcacatacatgtttgtgcccacacatgcatacatacatatatttaaaacaaaacaaaacaaaaaaatctttgaaatgacagttcaggctggggttaaagctctactgcatgcctaaagccctaaagtcaatctccggcaccgaataaaccatgcatgatagcatatgtctgtgatgccagcatttgaggggaaagccctaagaaggaagagttcaaggctcacagccatctgtagtgggatccaaagccctcttctgctgtgtctgaagacagcagcagtgtactcacatacacaaaatgaataaataatttttaaaaacttagagtcctgaaaccacagatcagtggtgtgaagcccagcaagtatgaagttccagatcctacccctggcacgtcactaattagttaagtaatgttcaaaagatttgtgctatctagcctgtttctcataaaacctaaagatctgagaagactggatttcaatgacagctaactgtggccactacataggcatgtgggtccagtcagttttgacttacggctcttgcatgtaaccatagaagcagctatggcttcatattcagctttcaggcttgttcacgccaccacccttatatatgaaattactgtaaacctttctcctttttaactttgggtcttgtgaaattgagagagttatttagaagccatggactattcccgtgttttatgaagcagaacttgtagttcaccatcatgcttgatttgggttggttttggtttggttttgtggcttttcaagatagggtatctctgtgtagccctgactatcctgtgttcactttgtagaccaggtttgcctcaaactcatacctgcctgcttctgcctcctgaatgctgggattaaacatgtacaccaccatgcctggctatgtttttttttttaagtatttttaatttttatttgtcatttttatttttttaatgatttattttcattttatgttcattttgcttgcatgatggttgaaggtgtcagatcccctggaatgggagtaacagacagttatgagcttccatgtgggtgctggaaattgaacccttgtcttctggaggagttgccagtgctcttaaccactgagccatctcttcagctcgtaatttaagtattttttaaaaagagaataaaatgaaagccctatggatacatcatatcatacagaaaaggaataagcctgtgtgaaagacacaaagttctatctgtgagctgtattcaagcagtttatttgtgcctttcacaaaatatattgtgtgctcttgtgctaagaagacatgaaactattccatacaatgttagaacttaaatgtagcctgcctttgaaccttttgggaggtgtgtgtgtgtgtgtgtgtgtgtgtgtgtgtgtgtatgcgtatgtgtgtttgtttgttgagaccatgtttcatatcccaggctgtccttgaattcactatgtaggtgaagatggccttgaacttcagtcctgcatccactatttcctgaatggtaggattatatagactactatagtgctgctatgcctagtttatacagtactgggaatggaatccaggtctttgggtgcatgcttcctcctcttcctcctcctcttcttcttcttggcttttttggctttctggccttttcaagggtttctttgtgtaaccctagttatcttggaattcactctgtaattcaggctggtttcaaactcagagactcttctgcctctcctgcccaagtgctgggattcaaagcatgagcaaccaccatccagcctagccactatctcttcatagccatatttaagaaatatttgtgtttataagtaatattaaagactaatgagtatgctcccggtcccccatttattttctggtcagctttactggctaaccgctttacttcataagggttttttgttttatctttttgtttgtttttggtcttgttgttgtggatttttaatatttatttattatatgtatgtgagtatactgttgttctcttcatatataccagaagaggatatcagatctcattacagatggttgtgagtcaccatgtggttgctgggatttgaactcaggacctctggaagagcagtcagtgcgcttacccactgagtcacctctccagcggaggtttgtttttttggtttggtttggtttggtttggtttggtttttgtttttttgagacagggtttctctggctgtcctggaactcactctgagaccaggctggcctccaactcagaaatccacctgcctctgcctcccaagtgctgggattaaaggcgtgcaccaccactgcccggctcctatttgtttttcttttttgcctttaatttaatttgttctttttactaggtccataaggtgtgaatcagtttactgatttgagagcagccttcttactactgtcattcatagttttgcttccttccaaggactgctttagtttatgccctgtacatataccatgtaatagtcggctttcattcagtattctccgtttgcttgtgggttcattgcttcagagtatggcgtttaatttcttcctttatgggtttctctattgagctgcatagttgctttatcaattactgaaagtagtatatcaaagtctctgttactatagaattacctaattttcaccttagtgtagttcatttttaaacgtacttttgagtttcttgatcattgcatgtatgtttataatgattatgtcttcttcatagatttatcctctcatcaatcggcttatattgctagtgactgaatgtttatatatcttcaccaaattcattatgttgcagtcctctaaccttacaagagatgaagtctttatgggattattgcccttagatgaaaaggccagagagagttttctcttcacatcctctacctcctttgcctttccatcactatctctgtctctccttgtttttgtatatatataaaactcttggggtttttttccttttattgaaaatggataataggttcttttttttttttttaaagatttatttatttattatatgtaagtatactgtagctgtcttcagacactccagaagagggagtcagatcttgttacagatggttgtgagccaccatgtggttgctgggatttgaactccagacctttggaagagcagtcgggtgctcttacccactgagccatctcaccagcccctggataataggttcttttctcatataatatatcctgattatggttcccctccctctccttttcacagctcctccccacctccattcatatccagatccactttttttctgtttctcattaggaaaaaaacaggcttctaagagataataaatatatataacaaaattaaatacaataagaacaaacaaaaactatcacatcgaagttggacaaggcaaacaaacagaaataaaacagcccaaaagaaggcacaagaatcaaagctccactcatttatacactcagaagtcttataacactaaattggaagccacataaatttctggagctttttgtttgtttggtttcattttttgtttggttgaggttttttgttttggggggttttatttttttggtttttttttttttttttttttttttggttttggtttttgagtcaggatgtctttgtgttaacagccctggctgtcctggaacttgctatgtagaccaggccagcctcaagctcacagatatctacttgcctctgcctcccaagtgctagggccaccacatctgactcagtggctattatttaaaaagaaaccacaaaacagggtatgccatttttgttattctgcctgaacagattaacttgtgtgtgtgtgtgtgtagtctgtcgttttcatttaaatgttcttttctttttattctttttattttataggtctattgtgtcctatattaattagcatagctgccagagtctctttttgcttaatatgtcatgaaatatctttttgtagccttttctttttaatttttttaggtttattttattttatgttcatgagtattttacctgattgtatgtatgccacatgcatatctggtactatcaggggttaaaagaagtcattggatctcctggaactggagttatagacagttaagagctgccctgtgggtgctgggaactgaacccaggtcttctgcaagagtaacaagtgctcttaaccactgagccacctcgccagctcttgtccttttgttttcaatctatttgtgtccctagttctgaatttagtgccatgtacaatataatagatgggtcatggtcttaatccagtctgaaaatatctacattttaaatgagagtttaatctattgacttttaaggtgactaataacaatgtattcgtttcctgatgctttggtaacaatgtagcacagattaggtaacttgaccagctaaaatgtatttcctcacagttctggaagctaggagtcctgtcttagttagggttgctagtgctgtgaacagacaccatgacttcctcttaaaaaaaaaaaaaaaaaaaacatttcattggggctggcttacaggtccattatcagcatggcaggaaagatggtagtgtgcaggcagacatggtgctgagaaggagctgagagttctacatctggttccacatgcagcagaagtaaatgccacactaggagtgcatagtgagtaagaccctatcctttgctaaaaaaacgacaaaataaatagtctctaataggattgctcttctgagtctttctggacagttaatttacagtcttgtttctatatgttcacaagtctctctctctgcatgtctgatttttaatcctctcttcctataaaaataccagtcatacccctcatgcctgtgatcatagcagtgaggaggtagaggcaggaagatcaggacataaatgccaacctcagctacctagcaagtgccatgatagcctgaaaccctttgtccaacaacaaggcacagtacacccgtaagacctcatttgtactgaactatctccttccattcttttactttccaaggtactgaggggcaggatttcaatgtggatttgttttttcagagaacagattcagctcataagacggaaagatttgattgtttttttctactttgctatttttttttaatctggcattctttcattgcccactcccattcctgttttttcctagtgtggtttgaaattttaatatccccggataagaccagatgttagaatacttggaccccaggtggtgacactgtttggacaggttttagagaccaggctttgctaaaggaagtatgtcagcaggaggtggccctcaagctttcattcccagttctctgtatcatgcttagccctcaagtcagccctcagcatcctgtccttgctaccacaccttccttatgccatctcagagtctaatcctctggaactgtaaacccaaataagctcctcaagttaccttcatcatggtgttttattacagtagtagcaaagcagtatgtctccttatcaaatccagaacggatttttgtagtgaagtattgtcttgttcgcttttcacgttctgtggtagaatatctgacaaatgcaacgtagggaacaaaggccttagcttggttcatgatttcaagaatatagtccatcgagacaggctactattatgtctgtggcatcaagaatttgtagctcatccaagtcatggctaatcagaaagcagagaactccagtcagaagtgtggcctggctaaaacctttcaaaggattacttcagtgacccacccccacaagccatgccttcttccccagatgtttcacaacctctttaaaaagcacagtggctgatcaggaagttttgaaggaaattgctaaactgctacggtgtcaataccattccacattcctagcataagtgagtaggatttctgtgtaggtcatcatccccagcatttggtgttgccaatattttagatcttgagcattctaaaacatgttcagcagtatttcactgttggtttgatttccagttctacaaagtcttatgatattggacagatttgtgtgtgtgtgtgtgtgtgtgtgtgtgtgtctgtgcacgcgcgtgcatgtgcacatgcaaacaagcacacaagcttatttgccatttgtgtatcttctttgtagaggtttctactcatgtctctaccctgtttgtttggagttttttgttgtttgttttgctgttggtttgggggttgctatttgggcttttgtttttgttttgtttttgagatattgtctcattttgtagaccaggctgttctgtaactcacagaaatttacctatctctgccttccaaatactgggattaaaagcatgtgccaccatgcctaactatcccctctttttaaaatatttatttatttgtatgtgtttgagtattctgtcttcagatacaccagaagagggtaccagatccaattacagatggtcgtgagctaccatgtggttgctaggaattgaactcaggacctctggaagagcagccagtgctcttaaccgctgagccatctctcctgccctctacgctcagatttagttatttttcttttactactgttctagccagcataactctgagtaaaatctgcttttcataagctacctgctctatagtaaactgttacatgacggtgaacaaccaaatacacgccccattctttctgtcttttctttcgtgtcatatgacattagctatgccagtcactgtgatttttaataggaatattggctatggccctcagctgtcacatgagtgatcttagctataaatttagctgtatgctttttgtatattatttatcaagttgaagaagttccttcctactttgggttcactcatggtttttcatcatgaatgtgtttctttgtatcaaaagccttccctgaatatattggtatgattgcacagtttttctttaaagttgctagtctgattgattttcaaatcccagttggttggttggctgatttttgttgttgttttgttttgttatttgagacaggttttgttatttgaaacagggtttctctgtgtagtcctggctaacttggaccaggatggcatcaaactcatagacatccacctgcctctgcctcctgagtgctgggattacaggcatgcaccaccactgtcctacaggtatatttgtgtatattatctttatttgatttaagtactgtggaaataattcccctatatagggctgcatagtgagaccttgtctcaaaaaaacaaaaaaaaaaaaaagagtagaaaatgttagccactaagcttctctctagcccgtgatttaatttgcttgctatagactcattcagattgcttcttctccttgaatgagttttgtctccttcaaataattattccatctcatgctaatgatcaatctacaggcaaaaaaaaagttattaagaatattcctttcctggactggcgaaatggcttagcaggtaagagcactaactgctcttccgaaggtcctgagttcaaatcccagcaaccacatggtggctcataatcacccataatgagatctgataccctcttctggtgcatctgaaatcagctacagtaaacttatgtataataataaataaatctttaggccagagctagcaggaactgagtgagcagaggtcctaaaaattcaatttccaacaaccacatgaaggctcacaactatttgtacagctacagtgtactcacatccaaaaaagaggagttagagaaagtacccaaggagctaaaggggtctgcaaccctataggtggaacaacaatgtgaactaaccagtacccccagagctgtgtctctagctgcatatgtagcagaggatggtctagctggccatcagtgggaagagaggcccttggtctttcaaagattatatgccccagtacagggaatgcaagggccaggaagcaggagtaggtgggttgggcagtgggggggggggggtataggggacttttgggatagcatttgaaatgtaaatgaagaaaatatctaataaaaaagactattccttccctagtccatgagatgaaaactgctagcccctctatcacttttgtaagtacttactaacttttatctgctcctttcttactctgttagtaaagctttagcttcattaatcttttctcttctcccttccccaagacatgaaaggcctcactaagtagccccttgtcctggaacttgatctatataccaggctggccttgaactcccaaagatccacctccctctgcatctcccgtgctgggattaaagaccggagctgcctagcccacttggtgagtttccgaccagtgagaaaaacagctgtcttccccccaccccaaaaaaaaaaaaaccaaaaaaacaaaacaaaaatggtagacagcacctgaaaaatcacagagggcaaaatccctctgtccttttcagtgcatgtgtataaatgcaaatctggtttgatgagtgatatggttttagtagggcttcattatttattagctaccgtggagggctgcactcacccttagttaatcaagttgccaaacatgccattttcctcccttaccagtctcctgctttataaagctctagatcagcggttctccaccttcctaaatgataggacctccaaccataaaattacttttgttgctacttcagaactgtaatttcggcattattgggaattgcaatgtaaatatctaatatgcaggctatctagtgttgggggtcgcaagtcacaagttgagaactgcagagactgtagtggacacctggacttagagcaccaccttgtgtcagaacaactgaagtgactacaagcaaaacaaacaaaaccaaacactgaggaaagttaaaatgttttgggttttgttgttttgtttttttttcaaacagggtttttctgtgtatccctggatgtcctggaattcagtatgtagaccaggctggcctcaaattcttgcctctgccttcaggttctgggattaaaggtgtataccatccttacctggtggaaagatatttatgcacatttctttattacttattttgagataggttctcattgtgtagacttggctgtcttggaacttgctatatagatcctcctgcctctgcctcccgctggagtggcgggattaaaggtgctaccttgccctactaaatgcatatctcacccttccccccacttcctcacatccgggattctgctggtctcagcaaacactgtctgaccatgaaaaagatggcttcagagtgtcctacaaatgtatatatcattgtattgaggacccggaattagacagattccctgatagacagacagatagggagaggggccaggactacataattaaggcgccaaacttccaaaatggctggttccttccttaccctcttgacctgaaacaaaagcctagagcagcttaaggcaaaggcctagagacctttttcctcctccactataggactggttccttgctgtttttgtcgtttgttgctttctttatgtgttttggaaattaatcccatatcagatagatagatagatagatagatagatagatagatagatagatagatagatagatagatgatatttttaaaagaatttttatgggttgtgggctgatatttaaacctttaattcattctgagttaatttttgtatgatgtaagctagggccaacttcactcttcatatatccagctacctgacaccattcaagaacctacccttctttccctactgtagacgtttgctcatcttgttgaaatttagttgagtatgtggctgggtttacttttatgctccccgttctgttctatttgtctatatatctgtggaggggtttgattttcttttgttcttttgttttgtttttatttttccacgagtgcttgtgtgcatgcctctgtgtgtgtgtgtgtgtgtgtgtgtgtgtgtgtgtgtgtgtgtgtgtgtgtacatgtgtgctagcactcatggagcccaaaaaaggaattacaaatggttgtaagcgtcccaatataggtactaaaaactgaaccccagtcttctgccctgtcttattttaatactgtgtaggacaccacatctatccttctttagcatatacaaattttatttctttcagtattttatatattatgggcactgtgttggcttgtattcctacacaccagaagagggcatcagatcccattacagatggttgtgagccaccatgtggattgaacccaggttctctggaagagtagtcagtgctcttaactgctgagccatctttccagccccatatacctgccttttatactagtgtcatactgttttgattatcctttcaagtatagtttcataccaggatatgtaatatctctaccttcattctttctcaagattcttttggttctttgggtcatggggttggggtaggggtggagggtgtatatgtgtgtgtgtggggggggtgattccatacaaactttaggatattctttctctgttgcattgaaacagcgtggacaagcctaaccaaatacaggtctttcacctttctactgattttcctttttaattgttttacaattgagtccttccttcctgtcttccatcctttttatttatattgaagcaggatctcacagtgtggctgtgactcctgactggcccagaactcacagggattcacctccctaaaggtggggttacagatgtgtgctacatctggcttttctttatttttaatcagaaacttattaaaatttctaataagaataaaaaattcctggtaatcttagaatggttttaaaagctctacttttctaagtccctacaaaatacttgcatcttaaaagggtttgcctggaggaactcagcctgtatctgtatctgtattgaaaaagtagttgtgagaaaggtttatgaacaactgtactgggtctacaactgctgctgttgtgtgttagcactgtggctcaactttcatagcagtccagtgcatagccacataccgtttatttgcgtccttcatttggaaaagcataaattaaagtttcattgatggatagatggatggataggtagagctccttttctacctatatagtaaccacccaaagagttattttgcttttgacaatttctttcaaatatattgccttttctctggtttataatagaaaaaccagagaagaaattaattgtaccttacaagaaaacagaaaaacacagacacatgtagcttataacgttcttcagctcctcttatcacagaatcttgatcctttttcttagaccagaagatcgattcagaagttactagaatgggaaaataacagattataccacaaggtaagacatgtaggcaagtaagtgctccgttcatatgtttgcattatcaaattgaaaaagtaagtactaagtccacaaaggaatcgactaatggactattcctcagttactagtatgccttctttgtttaaaaagaatttttccgggctggtgagatggctcagtgggtaagagcacccgactgctcttccgaaggtccagagttcaaatcccagcaaccacatggtggctcacaaccatccgtaaagagatctgactccctcttctggagtgtctgaagacagctacagtgtacttacctataatcaataaataaatctaaaaaaaaaaaaaaaagaattttttcctttttttttagtttttatttttatgatttatttattattatatctaatagctctcttcagagtcagacagacctcattacattggttcccattaaagatggctgtgagccaccatgtggttgctgggatttgaattcaggaccttcagaagagcagtcagtgtacttaaccactgagccatctctccagcccattagtatgtcttcttgataagggttgtgaggtactgttttatctcaagcagcctagattgtacttttagtgacatattcaaatataattagccaaagatagaagaattcttaaccaaaactcttacctttttagcttgctctgcactggaaactgactaaaaggaaatgtgaaactagcaatatgatggagtatgtaagtatgaagctgttttaattgcattctttggatttttacgccttgtgcttgctgtctgttaattgtgccttttagcttctcagcccggatttctgtcagttggggtgcagaggccaccgttcattttcttttgctttgtggccaacctaaagtatctccggagtttggagatcatttacatctttgaaaagtctgagctcctgtgctcagctgaaaatgttccatacccttcatttctgttacctcagacacaaactatataacatatggcagtaagaacagctgctgcctagcaaaatccactgaggtgcaagcttatcaaaaaacttatgtagggattcactctcagttttggactcacatccctggctgctttttgctttttttttttttttttttttaatttggctggcatttagcttggagtgaataaactattgaatgagtaaaatctatcaaaatagatttgatacaggctaaatcctgctaggtgcggtggtacatacctcttatcccagcacttgagaagcaggggtgagcacatccctgcgagtttcaggccagccagggctaaataatgaaaccccacctcaaaaaacttttcaaatatgaaagaaaataggtagccttagtcacaaagcataaaaccacatataaacaatatgatctgttcagcatcctgaaccttccaaacttccagtgtttatcatttaaacattccaagggctgagggcatagtacaatcagaaaagtgcttgtccagcatctagaaccctcagtttggtccccagcaccactctaagcctgtaatccagaagttcaaggtcatctttgacttcatagcaaggtcaaggcctgcctgaggtacatagacctgccttcatcataacaataatagaagaacataataatagaagtggcttgcacctttcatccagctcttagaaacagaggccaggtgaatgggtaagtgtggggccagcttgatctacatagcaagttccaggccagccagggctatatagtgagacctgagaccctgtctcacaaaaacagaaatatttttttctaatctatataaagtagttttaacctcttcttcttggctgaaagaaaaggtacgggatataaaactgtaatagggtttgcctcttggcaaatgtctgtcataaatcaggcaataacaactgttagttctagtgggtagggttggctgccagtttgatttggaaacaagaggcctgtttggtcataacctaattctttgaataactgttttttgcatttcaatcactccctgtaatccacgatgaaaatgcagtcctgtggtactcaacaagattttgtgggttatgtacattaaatgaaaaatatcttgtcaatatattcttttctgtctttattttacaggtaatactaatagaattcttaccaaaataccccatattccgacccgactgaggagttttcttcagtctcttctgtgttatctgtcatttcctacccttagtgccttgtagatgatcttggaatggagacagtctccttcgctgtgttcaatttattctttacaacagtagactattcttctcactcttttatttgtgttaatttaagaaaatttgcacatcttttttgttattaaatgaggcttgtgttttgcactctcaatttttaaataaatgcaaacatatacccgtatttatcgttaacactaaaaacatcagtgctggtgtttaaagaaacaaaacaaaaaccttgttctgagcatgctgccttatgattttcatactcactgtttctaaatatgcatcattttcctaggctatttaatgctctgtaatcccttactggacacacccaaataagcttttggtagcttttagaaatggttttactctgctcttaaagaaaatgcaattaatagcactggtttcctcctgcactttgctaaattgtcacttatgttagtggataaaatatttaaactcctaaagacttgtaaatattgtctctttgcataatgtaaaatgtggtatgccatggtttacagaatgtattattattatcaatgtattgccaacaattccacatagattttactatgaatgatgtttgtaagcatcctgttgaatgtagagacctttaacatgctgttttgtggcaaagccaaactgagtatgttaaatttcaggtgtggggcggagtgcccttcctaataagtggattaaaattgaaatcattacttcagatcttaggcatcacacctgagaccaagaaccttcttttccatttacttcactgttttccatttctcctccactccacccccatcttacagcctcactagctctcatttcctttcccttctttgaaggtacacaagatttcagtctttaaatgtcctaagagctggggcacatacccgttaatcaatcccagcacttcagaagacagagagaggcccacagatcctctttgagttcaagacccaaccctggcctacagtatgagttcccaggacagcctggtctacagtatgaattctgagacagccagggctacacagggaaaccctgtcttaaaaaaaaaacaaagtgtcttgagatttttgcctcttatgtgaggtatcaaggcctccgtgaaagccatggcttatcctcttctgaagttcctgtatcctacattgagaaagagcacagagaagctctacctacatagtaggctagtcagagttgagaaaacagtttcagccgtctgattggggatcttttttaaacacttataaattattgaggaaagacaagtaaaatttagataaaattgttttcgtttgtaaattggccacattttttgattgatacatgcatatttctctggttttttccataattaaattgagtgatgttactactttgattctactatgaatttgaaattataatataatataataaatgtttttctatcacattaattcaactgcaagtgaatgcctgtatatgggcattgtttgtaatttgcagtgactgacatacattctattctctttgtccttctattcttaactgcttttaagtaagctcatctcagtgaacggaacaagcttaacaaggtcaagcctttttaaggcacttttaagagttatgcctaatctgaaatccttagtccttggtggaaagaggaaggacatcctgtttgatatgtggctctaatggtttgcacaaaatctttttgagccacccagccaccccagatctctaagttctaatatattatgtatgcctgcaaatatgtctgcctgctgcaaaattgaaggtgtatttttatagataagaaggaagcctttgaaaatgcatacccaatgtcttgttttatagctaaggtcagggaaaaacatatctatgtcttatgtttcagctaatgtcatcagatttatgcttcatactgtggtgttttaataccaaaattgatttccatcataatatagaattttaaattctcactggtaaaaaaattacttgtgaatgtcaatcctcagcaatcttacatttcgtctgtagccttagaatttgaccaaatagtcatcataggaatttttttctgccatgtacaaatcacacttcattttgttcagaaaaaaaaaatcaagaggtgtaatgaattgtttccatgaaacaaatattaagacaggaatagattgtatatgaaagtgaccaagtatcattcaagttacaatagtatttgtcatttaaaatatttatgattacatgtcatatcaatttgaactcctcactaataactgtattattttattgttcagtatattgattgacaggtgatagttttctcgttacttttcttttttatgtgactggtagtttgagtggggaagaagttccttttcattgaaattagtcacagcaaatgctaacccttcccctccaaacttcttttcttttaacctcaggatagaatgtaacttgtatttttctattgggttagccaagtattttgtgaaaggtaatttttgactaaaaaagagaataattttgttgatatataatactcctttattaccatggtagtttccaaaggaaaaaaagttttgaaataacattttgccaaagcttctaaatctctataggctttgagatttcaacttaaaggacttttttttttttccttattctgaaaagcctggcatggtggtttataccccataaattagtgaatcccagcatttatggggttaaggcaagagaattgctgtgaatttgaagccagcctgggctacaagctgtctcaagaaaaaaggaaaggaaaggaaaggaaaggaaaggaaaggaaaggaaaggaaaggaaaggaaaggaaaggaaaggaaaggaagttagtttttgttacttctcatttgatccaagattatggtttaataaattgatccaattggtcaatttaaagcttatgtaaaaggccagtagcatctatattattaataaaaataagggcaaatgtcacttgcccttgtctcagacatgtcctctacttgtttcccacattaccccatgttaatttaggaaaaagattattgtaactttagaaatagatgggaaagtgccttgtctttttcaaagataacgtggtatgtagaaggaagcagaataaatgaattaataatgattagaaatgcttcttttcaagtaggcatgatagcactaggttattatatttctcttatttaaatccatttacttatcttctaataatgttgtatattaatgacaaaatatcacagaatagaccaggcacttaaaaattggtatgattttaatgctaataagcatagaatttaacacagttctggaaggactgtctttgattgaagaccctaccaaaactcacttaagaattaaatatcccaagccaggcagtggtggcgcaagcctttaatcccagcacttgggaggcaaaggcaggcagatctctgagtttgaggccagcctggtctacacagtgagttccaggacagccagggctacacagagaaaccctgtctcgaaaaaccaaaataataataataataataataataattccccattttttatattaacatgacctgtaaacattaatatctcagaaattaaactgtatttgtgcccagcattgccatttttaatgagaattattgttgcctttgataactttaggagagctcaataccatttgtaagcctaacaacaattaggtattttcaaatgtggtgagacctttacaaatccttagcaccttcatttttgcttacagataagctgccacttaaaaataaaccattacttgaacacaaagaccccaaacaatattttatttgagtttactgtatgtcctaagcaaatacagaatttacactcatctgattcattggactaacttcacatagtggaaatactttttcctaaattgactggaagtattcaattcattgaaattaagtccaattatacttataattggacttaagtctgcttctttaaaaaaaaaaaggtctattttacaactatcaaatcattcaggttcccttgagtggtgaactgttgggaaatttttcgtggtaaagaataagtttattaatacttgtccatatactttgtgagctaaaaataatagaggggtatctataagtatatccttccatgtgtgagtgtgtatgtatatatatgtgtgtgtgtgtatatatgtatgtatgtatgtgtataattcttatcttgctccagcttttccactcacctgattctgagccagcctttttattttgatgatggcaacctgagaatatgttccattttctgtgaattttgtcaaagtcagacttaatgaagaaactatctaatattgtggccccaggcaagtggtctaaattatgtgtcagtgttttcctctgtaaaagtagagggttgaaccttgagctagacaggaaatgagaggttagttaccattctgtggttctgagaagccacagaagatctttgctgtgcagtgtgtgaaaatggttattctcggatctgcacttggtggaaactcacagtgccttgcacacagtttgagttcagtttgctggctggctgctagttgatgtgtgttagtgaaaacacactcaaagaacccaatgcctggtagaccttattccctctgtgctgataaaagtgaatgtagtttccctaggaaggaggggctgggatctctgtttgccatgtggaatctgactacgcagttggtatcaggtgtgacattggtatccgcttagactgtgtgaagagttgcaggctcaatttcacatctccttcagtgtctcaccaagttccctgctcaccaaaaggatctatccgaacggacttagaaaattcggtggaaaggaaaatggcatgaaagttcaaacccaagtcacttctggtttcattcctagctctgctgcttaattcctctgtacctcatgtcctcattgctgaagtggggacaatattctggacctacctcacaggggaattgagggtctttttcatgtgtctgtgtgcttagaagctgactaaaagaaatattggatagcatgattatataatttctacgtagatgtgactttcagtctgcattatgttttctttctcagtaacatcctacagagtgttctgactcaatttttttcccaagtcatttttgttgctaatgccctatttgttaaacatgagtgattgtactatattaatacttgatttagggaggaaagcaggtgggtgtaaactagtggccctcaggttagagtagatgaaaaatagcagtggaaagtagccttgagcctttctcaagaatcattaattcacataacactaaaggccacacactgacctatcacattccttctacaccagccaaacaacacatggaatcaccatgcattttgctcatgttctttcctgttctgtctattgacatgcttactgacactgattaaaagctgtgaatggaagtgtgcttgtaattaatagaaatgagaaagctgtccttaagtgtactttaatatatacttgaaaatggggaaggaatttagagatccatataatgaaaatgttaggagccacttttaagaagaactaaaattatttggcctctcaacacattgtgtcctagtcctgaatgattgggggcaagggggagagagagagagagagagagagagagagagaaaataaatgagaattgactagattaagctataaattcagattataatttgccttcagttttggtttgtctctggactctagaactgaactgattcagtggggtgtgtccatgcacacacacacacaggattgcaaatgtacaggattgcagtgttctggtgtcatgttctagcattagtctaagtaacagtttctcagcatctgaaagtagttctatgtgtaaagcctgtatggtaatcaaggcaataagttctcaaatggtccttttactcctgcttctttgatttgcttttatcttggcatagttttcctgcttttctgtttttattgtaagcaaatagttgaaaattgttctaatgccaggactttggaacaagttacaaatgtttgaaattatataatctacaagctagtttgctgtccttggactaattatatataagtgtgaatttctactgcaaggacatccagatagagctggcgttgttctaaagattggattgaaaaatgaaacaacttctccattttggccaaggattcctgttggaacagctttcccagaagagaatcatagtggctatgtctgtcgaaccaagaacattcatgcatcttgtagtgttatgtagcctgtggaatgaattcctcttccccctggagtccaggactgactctcctggaagaactcaacctatatacagctgtgccaaaagaaggctacctgcctctgaaactcccactgctgcttctgtcgttgttcacttgtcagatacaattttattctcaggatgcaaattccaataaagtacaaacccatggtactgagttgaaccgtgtggctttggggcacaccgtctcagtttccttaggttttcatcattataatatcattacttaggggcagatacagtaactcagatggtaaaagtcttgttgcctaggtgacctgagtttgatccccaggacccacatgttagaaggagaaatctaacttctacaagttgtcctctgacctcatataacacacacacacacacacacacacacacacacacacacacacacacaaataaatacctaaatgtaattttttctgagacaaggtttctctgtgtagccctgactgtccttgaactcactctgtagaccaggctggtctctaactaagagatctgcctgcctctgcctcctgagagctgggattaaaaaggaaaggagagtttatttggtttacacttccagatcacaatttgtcatgttgtataataaagttaatttatattaatttttacacaagtttaggccttatgaaaacgttgctatgatggtgatcatcaaacgtattctcaaccccctttggtagcaatcgaacaccataactcaacaagccaggtgtagtggcacagacctctaatcccagcactccagagcctgaagcaggaagattatagtaaattcaaagtcagcatggtctacatagcaagttccaggccagctggggctaataatcagggctgaaactactgataacaatgataaatcactttgtagagatcactattacttgaagcttccttttaatgacaacactttgcatattgcctctcctcccattgagtagtattgtgtctgattgtataagtagtaaatcatgccatttattggctttgggaaccttcattgtacccagtgtttgacatatggctaagtagaaagctgtttttgaatgatcttactaaacataaatgtttaagcgtagagtgtagaaatatgaaagtgcttagcaagtcctgcgtcttaccagcaagttactccttatcagcatcttctacttaagttgtattcaggtgattaatccagttatactagattttttaaaaaatgcctttgcaaaattcatcgaaaatagcaaaataagggttagaaggatggctcagcagttcagagctcagctttccagcctccataggcacacatgaactctcaaaaatacacatacacagagcacataaaaataagcctagttctgtcagtggaagttgttgacaatgacagtggttctttgaaaagagcaagttgaaaagctgagcagtagtgtagcacacctttaatcccagcactcaggaggtggaaccaggaggatctctgagtttgaggccagcctggtctacaaagtgagttccaggacagccagggctacatggagaaaccctgtctcaaaaaacaaaatgaaaacagagaaaacacatagaacacaatagaaacaaatgtattggaaaagtctagaaaaaattggtgtggatgacttccaagggtttatgtccatctcacagtaaaataggagccctaaaataatggagccccaccaattcaaacttgcccagtaaccccatgctggtggaagaagagatttcccactattctaacagcttacctcatgctcaggttaccatatgtgtatctgctgctttctgttcacctcttccaagtttaatgctgttgttaggtagatagggttagtagccttgtggatggacctttctggcgtggtcctctattcacctgtactcccattgcctgccccgtccaatttacaacttaaagttctcttgcccgggtggagagttcctttaagtgaaagctaaacttcctcccggtggaaagaatggattctgagctctgcctctggctctaggtggaaactgacattctgatcactccaaagattagaaaaagagcatactagcgtctccaccctcaacagttagcccatggctggagggatggttcagtggttgagggcttattgctcctgcagaagactcatattcagttcccagctcccacatcaagtggctcccacctcctgtaactcaaggtccaggggatccagtactctctggtctccaagagcactatgggtctggggtgcacataaatttacacaggcactcatacatccatacacaggaagtcaataattttttaaataataataataattaatccaggtgggcctggagaccatcctacaaattcttgtcaacctgcattattactgaacatgccaccttggatcctaactcaaaaagcagggcttcctctttctcttttctctccctcctcctggcaactgctgagattgacagcttgcatcctctgtatgcctatctgtttttttcttgaggctaggctgtgggagttttattgtttgttattgtttgaattttttttttttggtctgtccttttggggggaagaggtggagggaacactgacttacaataaatatatatatccttgcatggcctgaaactccctatgtagaccaggctggcctcggagatacacctacctacctctggctcccaagtgctccattcaaggcatgcaccaccgtgtctacctgtgattcttttgttagattcttttgttaacaagactgagtccatactgagaaccctgaatttccgcatgacaaggaagagacaatgaatctttctttccctgccttgtccaaattataagtaaactcattttcctttaccaatttccattctcaattcttttaaaaatacagaaaaagtaacagcctaaggttttttgggggagggggttgttttaaggaattattttattttattttttactttttggttttgggtgttctctgctctttgttttgttgttacttcttttaaaggtggccagaccacagtcacacacaaggtagcctgaaacccaccaggttagccccaaactcacaggcagtgttctgccttaacattcccaacttgcctggatcgcaggcatgcaccatgccactatacctggtcagtggcagccattttatgagtctgggtgctgggtaacaataaagcaagatgctttcagtccgtaaaaatccctaaattcgccgggcggtggtggcgcacgcctttaaaatcccaacactccggaggcagaggcaggcaaatttctgagttcgaggccagcctggtctacaaagtgagtcccaggacagccagggctatacagagaaaccctgtctcaaaaaaccaaaaaaaaaaaaaaaaaaatccctaaagtcttaactgtttcagtattgctcaaaagtccagtccaaagcctcctaaaaacacagctctacctaagcagttaaaacatcaaaaacaagttacatactgccaaagcacaatgacacaaagcattcctgttgcaaaaagggaaaaccgggaaagaaggaatcagaccaaaactgggattgatttaagggtttatttaatcttactgttaatcccaaatgtgggaggagaaaggccaccgactcagatcatcagagccaaattaattaaagcaagctcttttattcatgttatacattttttttactcactttacatcccactcacagcccccttcctggtaaccccctcccacaattcttcccccatctccctctccccttctcctctgagagggtggggcccctcctgggtatctccttccacttccctgggcatatcaagtctctgtgacactaggtgcttcctctcccactgaggcctgacaaggcagcccagctaaaagaacatatcccacagacaggcaacagcttttgggatagctcctgccccagttgttcaggacccacatgacaactgaggtgcacatctgctacatatgaaaaggaggcctaggtccagcctgtgtatggtttgggtccaggttagttgactctgttggtctatcaatggagttcctatcccctctgggacccacagttcctcctcctattcttccataagagtccccaagctccatccactgtttagctgtgagtgtctacattcatttgactcagcttctgggtggagcctctcagaggacaatcatgctagcttcctgtctgcaagcataacagagtattaatagtgtcagggatgggtctcaagttgggctgatattcattggtcatttcctcagtctcttctccatcccctgtacctgcatttggatacaggataacccatccacaaaactttcaacccaaaatttatcctgtatccaaatgccttgtttttctgtttactaactgtgaggtattaggcagtgtgaatttccacttctacactgtcaagtgaacagtttcactattttttaatggtcttcccaggtctccatttttaagctcacattatttaacattgtaaggcaacattgtgcatctttaccagttctttaagtgccctagatgcaaagctcatgcgttaacctgaagcacccaccattaatggaatcagaaaggtcttcttgcttccccttgatgataccctgcatcttagtcacatggtgtgcaaatctgtgcaggcagatagagctctatgaacatagagaggatgctctgggaactcaggaactaggttgaaaaatgaagtatttgtgtccttagtagaatgttctctaagaggatctggcagtcttgcgtccatgaattggtgtggcccttgtaagtagaaatatctagtaacatggggccatatttaaacatagcataatgcaaaatgtatttagtccaactttcaaagtcctcatagtctatagcagttgcaacaatgttaaaaagtccaaagttcaaggtctcttctgagattcattcaacttaattaactgtgatccccaaagcaaggcaggaaaccagctgggcaaactccaaactctgcatctccatggctgatgtcaaagcagtcttcagatctccactcctttttcagctttgttgactgcaacaaactgctttctcctgggctggttccccatgttaaatggctcagcgattaagagcaccgactgctctttcaaaggttctgagttcaaatcccagcaaccacatggtggctcacaaccatctgtaacgaaatctgatgccctcttctggagtgcctgaagacagctacagtgtacttacatataataaataaatcttaaaaaaaaagatctagtaacattgtcccctcgtgtgttacctagttagcacttgtgtacagtatatgctatttctgcaaatgtgtttcctattatccagattttttaaaaattatagtacacgttggggatgctattcaagtgtctccagaaaaggtacatttgtcagtccacaaatctcaactttttattcagaaaggagaaagcactcctcttttaccaccacaactaaaatattatggtatcatgagaagaaaaaaaaatcatgttttaaattcctgtctgtattatcatagcacttaagatagcatagtaggttttaatcaagctatgatgtcagcagttggattaagaataggttaagccaggcgtggtggcgcacgcctttaatcccagcactctggaggcagaggcaggcggatttctgagttcgaggccagcctggtctacaaagtgagtgccaggacagccagggctacacagagaaaccccgtctccaaaaaccaaaaaaaaaaaaaaaaaagaataggttaaatttagacttctcaaatcaaacaggagcagggctcccagatatggcatgtgacaagagtccttgtattcacaaaagctaccctgccaagatattttaattataatttttaagaggtaggtacacaacgtactgaggaaatgcatttgttttttgtttgtttggttggtttggtttggtttgttttgttatgggttttttttttttttcaagacagggtttctctgtgtagccctggctgtcctggaactcactctgtagaccaggctggcctcaaactcagaaatccgcctgcctgtgctgggattaaaggcgtgcgtcaccactgcccgcagccccttgcctttcagttccttagacctcagcccaatcacattttacatacctatagggcttttaacatttccgcagctttctggtttctctcaaaaattctcactgtccaaaagcttgagctttttcagtaaagtaggcttactgatgtctaacttgaagataaggaactccttcttgagagggaaaatgagcttcctaactgctttgtcttaaagcttacttcattctctaagctgtccactctctatcctccccactttctggactccaaagctctgacagtcacaaagtagccacgtgcttagcacagtacttagagcatttgagctggggtaaaatttagaaccagggttgctaaggcttgggtaaaccaacttgtccaatggggaaaaaaaactaaatgtccactaatttttttttttagatttatttatttattatatgtaagtacactgtagctgtcttcagacacaccagaagagggagtcagatcttgttacggatggttgtgagccaccatgtggttgctgggatttgaactctggaccttcggaagagcagtcgggtgctcttacccactgagccatctcaccagcccccactaattttttttaagatttattttttatttatgagtgtttgtgtgtgtgcatatgaacatgttcgcaagagtccaatgcccacagaggtcagaagaggacatcgaccctctagagctagagtttcaggtagttgtgagctgttcaacatgggtactgggagcacaactccagtcctttggaagagtggcaagggttcttaagcactaagccatctctccagccagactgaagcttaggtaaatcacttatccaatgctaaaaacaaattaaaggaccactaatcttttagtataaagtaaatgaccactaatcttttaatatgctttcatcaattatttgaaaattttatatagtgttttttgctcatactactccctactcctctatcaactcctcccagaccaatccctaaccacttcattccttctcaacattgagtcctctttttaatagatagatagatagatagatagatagatagatagatagatagatagatagatagacagacagacaaaccacaagtccagtttgtgctgtccaaatttacctgggtgtgggcctgcccgttcactgcaactaccaagggccacactcttaaagttgaatttccctctgccaacagctgctatccactgtcaatacctccttagttaggggattcagagcccctcttcctgctaccactaatactttaaatacctatcaacgggccttgaactgatcagttagctgctgtgctcttctttgcctgtgtccacttgtccaacgtctttgcaaagaaatctgtcttgtttcagactttttgggctctaatattgacacgactgaaattgagatccagtaaggtaacactcgatttgctatcattttccagccaaagaaatacatagaagcaagagacccccccccccacggggaaaagaagaaattgggaaactatagcatgtgtattcaaagctgacttaccaatgagtagaaagagatcttgggtatgtttcagttcctaatacagaacctggatcttgaaaggactgcaaaggatcagcaaaaggcccgagatgagaaatgacaaaatgcatgttgtatcattaggtgagctgactgctgcttatctctagcctggtctactcttgattttcaagcctttgagatctagcattatacaaggttgctaaaccacaaagatacgaagtagaatacatgtttctttttttaaaagggggtatgatgatacaggactttaatcccagcactaagtaggcataaactcaaatctctgtgagtttccgggtagcctggtatacgcagcacgttccagaacagcaagagttggactctcatctcaaagggggaggtgggggagaaggtgatacatagaaagtgaattgcaaattgggagcttttgtgaaggtaaagaaagttgtgagccacttgatgaataacaggaagtaaaatggagaaccagtaaaaagaaaaaaaaataccctgttatttatcctccctcttcctgctttttccatttttgattctttgtgaatttcacatcctgcactccaatcccactaatcttaccatccctgcatatcaaccctccactctagcaacctcccctccccccaaaaaaactaaaagtatttttaaagatttatttattatttatatctaagtacactatagctgtctttagacacaccagtagagggtgtgagatcccattatagatggttgtaagtcaccatgtgtatttgaactcaggaccttcataagaacagtcaagtgctcttaaccactgagccatctctccagccccctaaaaatatttttaaaattaaaaaaaaaaaaaaaccttgctgtggaatctgcagtgtgtcacagtgtgtctcacactatacccttttgtccacacatcttttttttcttaagatttatttatttatatataaatacactgtagctgtcttcagacacccctgaagagggcatcagatctcattacagatggttgtgagccatgtggttgctgggatttgaaatcatgacctatggaagagtagtcagtgctcttaaccgctgagccatctctccaacccttctccacacatgttaacttgcaaatgtttattgcaatgagtcattggtctggttcgaggcctctgacttctgctacatcatcaaaaccagaccctcacagagacttctctaggatatcctactgttgccctgtgtcacaaagactctgcagttttggttctgcagacagaccccctgcacgcacttcagcagatcatagataggttatgtgttggggtgggctaacctaaagccttggatctgggcctgagtggtagctgagttggtcagcccactagccctcatggccatggcaaggggcggggcctccttctccaaagtgcctcaatgagcaagggtggggccagctctcccaggttcctcagcgagcaaggggaggggccagctttcccgctcacgcaattaaggccaggcaaggggcggggccagccctcctgcactgccccacactggggcggggccagctctcccaggtgcctcagcgtgcaaggggggtggggcggggcgaggcggcggctgggtactgccctcaaacagcaacatttcctctgatggcgtgtgagaccgtgcactcccatgtggcctttagtggtaacatgggccatggtcattgacactgatgcctgctgctatagggccacagaagcatacatggcctttggcggcagcacagtcccaaacatcatcatggtggctgtgcaagcctctcacatcaggctgttcctcatagttctacctctcttcatagaacacaaactgctctgcttctccttctctgccatcttttcaccacatacttgctcactgtagtagtgtttaccccagtccccaaagggtaggcctgtggactctggctgtcttccaccctggtcccaagtctcatagatcccaggctggccttgaactcactatatagctggaattctgatcctcctacctccactctagttggaattgctacagttgtattctatcaaagtcagtattggcaaagttgatttatgtaagcttagtttcccaggttatgaaatgtaagagtgggctgaaatgagcaagcactctaccaactaagctataccctagccacttccaccatttcttttagtctctaatctgtccccaaagcttcttttgtcaatcttcatgaaaatgacttgtttatctttaaaactgccttcaccaaagggccaactgatagactcccatacagttgaacttgtgagatctagttggggaaagtaataaactttggtatttaggacctatccccaaacagaatctctatgatgtagtaatcgggcatctgtttttagccctccccgctttcctaccttggccaggtaattctggtgtacaggttaactgattttttttccccaataccctgatgtgctaggtaagaaaactaagtgatgcctagaaaggggcagagttcaaacctagaataacaatatctgtagtgaatgaagtagtatcagaatcccttagcccatttgtgtccgtctatttgtgctgttataattgttgacacaaaaataccactcttacctcaaagagggtaagacagagcttattctgaagccaagtagaagtgattgcagctcaggaagaagaaagtcacaaaccaacacactttttaaacacattatggagataacaggttacaggcaagtggaaaaatctcagctataagtctcaaatgttatttaatgttttgggtcatggaaattgaggatttgttaaattaatacattccaaatggtttttctctgatagtcacaggataatggatcaggaactgagatgggtaagaaataactattaaggaagctaatatcaggctgaagagctggcttagtatttaagagccctgactttcagaggagcccggttccattcccatcacccaccaggtggctcatagccagttccaggggatctgatgttttcttatgacctcctcaagcaccaagcaatcatatggtacacagacataaatgaaggcaaaacacataaaatagccaggcgtggtggcgcacacctttaatcccagcacttgggaggcagaggcaggcgaatttctgagttcgaggccagcctggtctacgaagtgagttccaggacagccagggctacacagagagaccctgtctcaagaaaaaaacaaaaacaaacaaacaacaaaaaaaccacataaaataaaatgaatgaatctgatttctaaagaaaagcttttttaaggaggctaaatagagtttaagataactaaattaagctatggaccaacagtattccaacttctccataatctttgaaattctaatcagttaatcagccttgaagaagtttctatggaaggtgcagtttctagtaacttccattcatagttcctcctataggtctagcatcacatgttgtgcatgtgtggggcaaatattaatatatcattgttataaagactctcatagccgggcaatggtggtgcacgcctttaatcccagcactcaggaggcagaggcaggcagatttctgagttcgaggcaacctggtctacaaagtgagttccaggacagccagggctatacagagataccctgtctcgaaaaaaaaaaaaaaaaaaaaaagactcatatatgaggctgagatgtgaggaaggtaaactttgggagagagaggactagttgagaaagccattaaggaaggttaatgttaatgtttctggataatgtcaaactctgctagccattaagatcccagtgtgactgctttttaattctctgcacttaacatgagatatatgataaaaataatatgcctaaaaccaaaataatcaagaatactgtctagcctaacaaaataaaggcaacagatgaggaaattaggcatctatttttttaattaaatttattcatttattttattttccaagacagggcctcactctgtatccctggctggcctgcaactcccactgtagacaaaactgtccttcaactcatggaaatccccctgcctctgcctcctgagtgtagagattgaaggtatgtgccatcacaactggtgaaaacaggcattttaaacagccaggatttatatatattttaaaaactagattgtgttgtgtgcactattcctggagagatatgaacaagcttctactcattccagataggaaaccaatctacactaccactcaggaggcagaggcaggaggatctatgaattcaaggccagccaggtctataaagcgagtttcaggacagctagtactacacagagaaaccctgtctttaaaaaacaaaaaggaaagaaaaagaaaaaaaaaaaagaaagcaaaggggctagagagactgctcagtggtcaagaacactggctgttcttccaaaggacctgggttcaattcccagaacccacgtagcagctcacaactgtctgtaattccagttccaggggatctgacaccctcacatagacttacatgcagacagaacaccaatatgcataaaacaaataaattttaagaaaacaagggctggaaagatggctcagcagttaagaacactgactgctcttccgaaggtcctgagttcaaatcccagcaaccacatggtggttcacaaccatccgcaatgagatctggtgccctcttctggtgtgtctgaaaacagctacagtgtacttacatataataaataaatcttaaaaaaaaaaaaagaaacaaaacaaaacaatcaaaccaaaccaaaatctagcagtatagatctaaatcctgtaggcaaaggttttgcatttgaaactcaattgttgtgtggtctttgggctctaaaaggcttggtcagtgcttagggactaaaaattgggtagttccctgacaggcagatagataggcaaagaggccacatagatcagtaataaagatggcaaaaaaataggcctcgaactcagaaatccgcctgcctctgtctcccaagtgctgggatcaaaggcgtgtgccaccacacccggcttcccagccccagattttaaaaactgaatttggctttccaaatcccttctcggccctgcagggattcttttcttcatgtgtgcctccctccaccaccacctcctctgtctgtctctctcatatgtgtgtgtgagtgtgtgtatggtgcccttcttcacatatatttaataaagtgtgttaaatattgttgtctagtgtgcctgagttcttcttcctgccttttaattctttaattggtggagaatgaacacaatcaagaccccaagacagtaatggtaccgtaatccacttcacacctgccactgtcctggattaaggtaagtgcccattgtgtttccccacaagaaccttggccaggtatagtggtgcacatctttaatccatgcatttaggaggcagaagcaggaagtggatctctttgagtctgaagccagcctaatctacatagcaggttcctgaccagcaagggctacatagtgaaaccctgtttcaacaaagacagaaacataaaaaacaagagactaaagggaaatgggggcaggaagctttcttcctgaggagcagcagcagtgagaggccatgttggggcaaggcactcagctctcaagaaagactaaagggagggcatgtactgggcagtttctagccaacccgacacacagcagggtcatctaagaaaagggaacctcggttgagaaaattcccccatcagattgcctgtaggccaatctctggggcattttcttatttaataattgatgtgggaggacctagttcattgtggatggtgcttgctcctctaggacaggtaggaggtcccctgagctatatcacctctgggcaaggggttctggattgtacaaaaaagcaagttaggcaagccagtaagcagcatttctctgtggtctctgctttacttcctgcatccaggctccctccagccttaagattctgccctggctgcccttcatgatggactatacccagtaaggtaaaagaaaccctttcctccccaagttggttttggtcagtattttaccacagcaagagaaagcaaactagaatagaaacttgtaccagtatggtcgttgctgtgacagagttgcccgcattttggaaagggttgtgatagagtgtggaatgttgggctagaaaagctgttgagtggtcactgcttaatggaccactccattaagaccttgggaggtagggaggctgagagaaatgcaggcgatgaaggcctggtttgtgaggtttcagagggaagtttgaaagtacttagagggatgaaataaaaacccttatctcctgtgttttagtttttaacttaacaggctaaagccagccgggcgtggtggcgcatgcctttaatcccagcactcgggaggcagaggcaggtgaatttctgagttcgaggccagcctggtctacagagtgagttccaggacagccagggctatacagagaaaccctgtctcgaaaaaccaaaaaaccaaaaaaaaaaaaaaaaaaaaaaaaaaaaaacaggctaaagccatcctcacctgaccaaattcctccattagattgcctgtaggcaagtctgtaggactccccacccccattttgctataagatggcccatcctatagtaggccttgactccctggccaggtgctcctgggttccatcagaaagcaggctgagcaaaccaagggagtcaaccagtaagcaacctccaaggcttctgcttcagttcctgcctccagatttttgccttgagtcttactctgacttccctccctgagagtaacttgagaattgtaagctgaaatgaaatttctcccccaagtcactgttacccatactgttttttttaactcctattatcattattactactattattatatgtaagtacactgtagctgtctttagacactccagaagagggcatcagatctcattacagatggttttgagccaccatgtggttgctgggatttgaactcaggaccttccgaagagcagtcagtgctcttaaccactgagcaatctctccagccccacccatactgttttatcacactagaaaccctaaaattattcttaagccgcttatcaatagaaagcaaactagaacccagaaggactgcagaaatggctgcctaggaacagactgcagaaatgcctgtgggggccggacatggtggcgcacacttttaatcccagcactcaggaggcagaggcaggcaggtttctgagttccaggacagcctggtctacaaagtgagttccaggacagccagggctaatacagagaaaccctgtctggaaacaccccctctccccaaaaaagaaagaaatgcctgtggggagcaagccgttaatgtaagcgagctcagtatgcttgcttgcttgctttttaactgtcagaaagagcaaattctgtataccagaaggccaaggggacaaaccttctgggcttggcaagtacaactgggagatctaaaggtctgtacagtcagttgggaggaagagccaacctcttcagtaagatctcggtaactgtttcaacttaagaagaccaataccagaactggaggcactatgggtcacctccatagcccagtgaaaggaagagcaaggaacaggtagatctctccccaccaacgtatatgtatgcatatacagacagccatgaactagatcacagacattttcttagcttttcatcctagctggggggagactaggcaccagcatagttttcaattttcagtggtgatgtgacagaatattcactgggcctttagggtactacagaaggctgtcattctctcatcatacatccctacctgcaccctcttgatccacatccccacctccagcccaattcacagcccaccttatatgctgcatgagtagtgctaggaaatctaacggtctgggcctgtccctggaaaggaaagccagggtcagaagtgaggtcttggcacccgtagaaggcataaagaagtctgttataaaacccagtgattgggagaacatagggacaattcaacccctcaatattaactgggtcccagacattttcttcacagttccaacctaactgaaagagaacttagacaccagtattttctaggctctccaaccacaacgaaccttcaggatgtgacagagatgtgactttttctattcttaccccactagaacccctgtgctaccctccccctcccccagctccaccctcctatctccctctactgcaccctagtcccacttcgtgtttctcaagcactacttcaaaatcaaatggtaaggtaagtcaaggttagcttaggtgccttggcttcattctgtttggtttagttctgtttgttttaggaagacaatcaatatccccaataaggttttaagatctttataaagaagagatgcccagtacttgatctagtggaagaaggactatagatgcaaatctccacaccccaacaacaatgaccaaaaagtcctgttttcttagcttttccaatctaggtgagggagagtgtacatcagtgttttcagggtcctccgaccaatgtgagtcttcggatactttagaggcttgacattctctagtcctataccccccacctggccccttcacacacacttgacgtgctcctccccaccaccgtcgccacacttggagaagagtggtctgtgttgtaggtttgggaggatagccaagctagtaccggacccaacgaagatccagtccctctcctccctaacattaactagatcacagatatttgttttgtgtatccatcctagatgatagagaatctaggagccagtattttctaagtgttccaatgtggatggaacattatgatactacaaagatcagattttctctcttcctagactcccaacctcccccatactaacctcccctactcctctcccagatgaccctaagcctatcttctgggctccataattactgctgggaaatctaaatgaggactgtacagggtctctgaaaaagagagtcgtgctccaaagtgaggtcttctatctttataaataaggcagtccactacctggcccaatataaggaaaagcacagaaatggctgcacaaaatagcaaccaaaggacagtgtggtagtgcactcctttaatgacagtactaggggaggccagaagcaggctagtggatctctgtgagttggggacaatctgatatatataacgaatttgggtccagcagaactacatactgagactttgtgtcaagaaaacattctctagagcacagccatttcttgtgcttctagggtagttgaagaaagaacaatgccactcgctgttctctagtatcatccctcagagagcagccatgagcctttagcctgctgccacaaaggtgtgacagtctcttctaacgtcgaactgccccaactccagcacaccacctcactttctggccccccagacctgtgcaccaccacgcaccatgccctgtcgttcattcccccaccttaagtactccacaaggactgtttgaaagtctggtgctcattacagatccactggaaaatcgagtccagttgtgcagtgagttcttgctggctttgtaaggtaggaggtctcaatatttaatgcatccaaaggaagaacatagggcagcccacctccaaggctttaaactagatcagacattttacttgctgcttcccatagagccgcaacctaagcagcgagtgtgtttgttctaagccctctaatgaggaagcacatttagggtaggtactaccaaagtgtgctactttctagttcgtgtcccacctctctgcccatcaccatcttaccccacataaccccatagcttctgccacgagccccacctgtcatggcgctggttccagcctcatgcccacccccaccatctgtgctccttgaatactgctgggaactaacagtctgtgcctgttgatagataaagtcaagctctgggaatgccagtgtctgacacactgaaaggaagggtataagaatggctcctacagcccagccttcgctcagatactgttaagcttttccaccccagcagagagaaaagtcagactccagtttttttccatgcccttagaggataggggtataaagtacaatgacattctcttatactacagttctgcagaactccctgcctgctcctggcccatttcctcacctctaggtctcacctcccatctactggttcccaaccactgtccccttcctacaccactgcctgctgatcccacccaccctcctattctatacaagtgctggaaactggaagggtagattgggaaggacaagctccatggttggaagatctaatacctgatcagtaaaaagaagtacacaggacctactccttcatgccaatactcactagatcacagagatttccttaatacttttaccctagctgaaggaaaatgtagaggtcaatgttttcttaagacctccatggaagataggcatttaggatactacagaggtgtgtcattctctggttctacccattcccaatacccgagggtctccagattccgccccctcaacttgaccccaccccagcacgagctgtgataaaaacttgaagctctggcccaagccctcaggcctttattcacagcacccacctagacttgggtatcagctccaccaacaaggtctccctccacagaagccgaatcccggagctatgtctgaaaagcaaagccccaagacctctgaagcagaatgcagtgcaatggacttgccagaattcgaggatgaagaaaactggcttttcaaaggtaaaaacctacttacttttttatagttaccggaaagaggaaagtgactcctctgggcacgagtccagggacactgtttctttcaaattccccaggagcaaaggggaaaccatctcctgtctccccagggttttcatttctcatgccacctctcccttgatatctaagtaatatcatcctaggatccttagttttctccaaagctgtcaaactaaaccagagattccctttaactggaggcaaccagaatgacacagacggttgcgaatgaattaaatcagtgttagttaaccatgtggacctggaggtggtagactgttggaaaggattgtcttttatagattagaatgttccagtatgagcctgcagttaccatcttctttctacgttctcctcgaatgtgggttatctggtattgctcctaaatcaaactgaaggacctactcaagaacaacaaaaaacttataaactaagacatttaacatatacgttggattcattttcagggctcccaatagaggagctagagaaagtacccaaggagctaaagggatctgcaaccctataggtggaacaacaatatgaactaaccagtaccccccagagctcgtgactctagctgcatatgtatcaaaggatggcctagtcggccatcactggaaagagaggcccattggacaggcaaactttatatgccccagtacacgggaacgccagggccaaaaagggggagtgggtgggtaggggagtgggggggggagggtatgggggacttttgggatagcattggaaatgtaattgaggaaaatatgtaataaaaaatatataaaaaaaaataaaagaaagtacgcgggaagccgggcagtggaggtgcgtgcccttaatctcagtactcaggaggcagaggcaggtggatctctaaattcaaggccatcttggtctacagagtgagttccaagagagccaggactacacagagaaactctgcattgagaaaaacaaaacaaaacaagaaacagaaagtgagctagatatggtagcatatacatttaatgctagccccttggaaggcataggtatggaaacctctttaactctgaggctagcctgttctacatagagaactccaggccaggtagggctatatacagtgagaccctacctccaaacaaacaaaatatcaataaagttgtttaagcttcctccataacagcccataaaatctatatattcttgctcctatacctcctaaaacatggaatacatgtgaggatattttcaaagtgctttgacttctaacacattaaacacaagttttatttgcatttgagtctgtgtatgttttaatcctcagtttgcctttttattctctcttgtttctttcgcagttctgggattccagcctgggccgtcctctgctctgggcaagtattgcaccttggaaccccacccccaacccccaccttgatatttttgcttctgttgttgttgtcattttggtttttatttatgtgttgacagtctaggtctttaaaaaccaaaaacaaaaaataaaccaaaaccaaaacccaacagttaagccttcatgggaatgaactcagcagctcgggttctctcctttagtgctggagtgggcccggtctgaagaggaactcaggtacctttttgttctgcatccccctttaagctcattttccttcacccatttcaagaacctaatgtgtttgaaaaagtgctaaataatgctgaagggatctttttccaagtttacttacaaatagtcaaaacaataaatgaaaatactatttttttggtatgtgtaaatacaaaatttaaaacactaaaaaaggtagtaaacgacaacttttatttttttttccttttatattcttgcttgtttaaagggtccaatctccaactaactattccacaggttgtaaacaaaaaaatctctgtggtatttagcttcaacaatatcattgagcaggtagcagtctcctgcacccagcagtttaagctcaagaggcctttgatcccaacccctcctttctaccaccctttgcttcctagctgcactttcacatttgatttttcatgatcacagatgatgacaccgacgatcaggcagatgagccactgaggtaagttgtgcaacactttcttcacatcagcaatggtcacctttggtgtcagcagctgatttccacccaagtgaacaagaaatacatcttgcatgaccttgccacacaatttgatgctcagcacagaaatgtacacttccatgagacatcctagagcagtagccgggaatctatgacgctccccccccccaaaaaaagaaaagagcctttagtcttcttgtggattgaaactggtaagttgctgtgagttttttaaaaaagtgttactgcagtaagactaaaaaattttctttggacttttatttcccacagtgttctgaaacccttgttatgaacatggtagatatcaatttctcttttgtactcagttttcatgggggatgttcccaaggccagaagcattctagttgctaagactagtgaatgaggcacagtgtcccagagaactgataatggaactcccagaaactctaggagaaaatgtagcctatttgtttcatgaaaacagagggtaggaacacaagcacagccacacctacttgtagaatcttggtctagactgccttgaaaagcacacattctccactgtggatgatccagggcccaaattgcaatatagttaaatcatttagggactactgttaggaacaaatctgtttctgttaaaaatattgggaatcgccgggtgatggtggtgcatgcctttaatcccagcactcaggaggcagaggcaggcagatttctgagttcgagaccagcctggtctacaaagtgagttccaggacagccagggctatacagagaaaccctgtctccaaaaaaaaaaaaaaaaaaataaaagaatattgggaatcaaaattaggctggtgattgtgacctgaacaaaaaacaaaccgggcgtggtggcgcacgcctttaatcccagcacttgggaggcagagacaggcggatttctgagttcgaggccagcctggtctacaaagtgagttccaggacagccaagaccatacagagaaaccctgtctcgaaaaaccaaaaaccaaacaaacaaacaaaaaacaagaacaaacttgataaaattccaaaactgaagcttttaaaaggaaagtgtttggggaacaaaatacatatatcaagtaagccagtagaagtgcaacaaagttatagtcaaaaaacagattcacctcactatttcagttctttaatctatacaatgaaaaggttactctaggtgacacgcttcagcttttagattttgttcaaggcatttttctgaagtaaatcatagttattcaatcatttatttggcccctgattttactttaagcaacagattagtatgtcggtttctgaattgcatgtagtctgtcattgagataaatgactctccagtgtatttattattatgacatttttctctagcgctgccgaatttcttcacctgcaagatattcttcaggaggacagagtcagcagtaccgatgatgaggacacttgccaagctgtaagttggtccaagggaagacagaaacacaccaaggtgggagctctgaaaaacacaaatgttcaaggggtggataagactctaaacatgatgcaatagatatggtactaggataatgataatgataatgataatgataatgataatgataatgataatgataatgatgtccactgaaaactgaatcacgctaagattgtatttaattgatggtcaattgtttcccagaagatcccctatagttaggagttataagagcttgtgagcagctgggtgtggtggcgcatgccctttaatcccagcactcgggaggcagaggcaggcagatttctgagttcgaggccagcctggtctacagagtgagttcccaggacagccagggctacacagagaaaccctgtctcaaaaaaacaaaaacagaaacaaacaaacaaaaaacaaaaacaaaaagagcttgtgagctagttgtacaatgtgggtgatggaaattaagctcaggccttctggaatagcagtgagaactactaagtgctctgctaactctccagcccatagtgcatccattttcgaaagcctcactttaaaagtttccaaacaaatctgggggagaggggagctcatggggctgggctgggggtggagaactaggaggactggaaggaggggaaatgcagtcagaatgttatgtatgcgagaagagctttttaaaaatccaaacaaactgataatgtgtttaattatatacccccaaaattttccttggtagtatataccatgaataaactaaagtgtaactgcacacgtagcaagtttattcttggccgaattattgaagcacagtatacagaaagagcggtgacagttctaccttattgtgtgtcattcagcttctggcgcactgtgtatttttagtatcattttctaaagtgtgtgtctgtgaaaaggtattttagcccataaaaagtgtttttaaaagccagatgtggtgccttgaatgtgtgatcctagaatgtctatggtgaggtgagaggcagagacagaatggtctggaaggttgtaggccagttagcctgaactacgcagcatggcagaaataagacttaccctgtcccagagaaggtagaaggtgagagccaatctctctctctctctctctctctctctctctgtccctctccctctttctctctctcttacacacacacacacacacacacacacactttaaaatttgaacaagacacagcatcaatacagccttgtgtgcttagacacaccgcatagagttttagcactatgccttggggtggaggttgccagcaaaaggaatgtaaatgtggaaattgtgatattagatgaacaatgtagaggatgtgtgcttaaagtttgagagctgaaaccaggtgacaaattgttcacctctctgtgcgtgtctgaaatgaccaaaaggcaattaaaatatttgcaaatttgctaatatagaatacatgaaaattgaggatttacttccaaagtaaagattctttccaagtagctgctatttgcctaccctgaagccaggacactagccctggggagctaaggtgaatgagacctagacagatataatcctctccactcctccttctttccttatttatttctgaaacaaggtctcactgtacaactcactctgtagactaggctggccctcaaactcacagagatctggttgcctctgcctcctgagggctggtgggattaaaaactgggcttcgagccctcagtcctgcctctacctcatcagtactgggactgcagatgtgtactgccacattcagatttccttttgggattttgaaagaaagaaaataaatgtgagcagtaataaaagccaattgaggattatagtcagcaaccaaagccactaaaatattctagaaccaagtcaaacttcttcagggtatctggtgctttcattaatgtgagcaatctaccattataagaacactgtacccaaggcccattttctcaaaacttatcaaggtatctacactaatgatcttgatgtgggagagaagcagtagtccataaggtacaactgtttactaagctttgtcccaactttattctcatcagttaagactatcaactctagggttaacattaagacaaaagtcctcctttgacagccaaaaattatctacttcaattttgactttcccctgtgtctttatcactccatagggatgtactgaagatgatgaaaccagtcacagtgacagagacatagacaataatgtgaaagtcatcactggcaacattaaagcaagcccctccatgtatatgtatgtattctcaattgttcttgggttatgggaaatccagggaggagaaatacaataggagttggttatccattaactgtgcttagtcttatccttggtatcagttgagaagcaacgtaggaagatgatgaagtctgtaatgacatagtgttgtagtgatctggtctgtagttccacacatcagttgcaatatgctgctgttcctttatgggatagattgtttttgtctactctgttttgtgtgtaccttttctcacagatgattttggtatgaaattatgtaggattttgtttttgtgggcctggctctcatttttgtaggaagtcagagagttcaaagagtaaaagagaccctaagtctatttgtattcatgtgactgctcttgagtacaagcaatgtcctagagaagaactttcatgctctgtcctttcagtactgtcatttgtcatgtgctagtggaggcttacatttttcttcttttttttcctttttccttttattggatattttctttatttacatttcaaatgttatatcccctttccacatctcccccccgaaaccctttatcccatcctccctcccctgcttctatgaggatgttcctccacccacccacccacccactcccaccttcccaccctcaattcccctacactggggcatctatcaagctttcataggaccaagcgcccctcctcccattgatgcatgacaaggccatcctctgcaatgtatgcagctggagccatgtgtactctttgttgatgacttagtccctgggagctcttggggttggttcatattgttcttcctgtggggttgcaaaccccttcaacttcttcagtcctttctttagctcctccattggggaccctgtgcttagtccaatagttggcttcaagcatccatctctgtatttgtcaggctctggcagggggaggctcacatttgatgtcttttttcctttaaaatggaaaaatagtcaggtaagatagtgcacacctttcattctagcacttgggaggcagaagcaggagttctaggccaacttgctccacatagtagcttccatttgcctctgcctcccagactgctggtgggataaaggctggccttgagctctccatcaccgtctctacctcaccacattgccacttccagatttctttttgagagctacgtagagcatgatttacatagtggcttctaggctggttaggactatatagtaagagcctgtctaaagaaggtgggggtagatagcctgtcttagttcaaatataaatgggtcatattttcatgtgtgtgcatgaatgattttcatgtctctctaagttgttggatttagcctattgacaattgattacactatatattctagggagatgttcactgatcagaacccacaagctgaccaagacctggaagaaactgaatcaggtatctttcttgccctttggattgttattgaagtcacacatttcatccttgcagcctgacatacatacagggaatttaaaggcactggaagccaggtctagggtacacacctttaagcctagcactccagcactcagagaggcaactgacaagtatctgtgacttcaaggccaacatggtctacataacaagttctaggcaagctagggctaaatagtgagaccctaccaaataaataactaaccaaataataaataagacaatggagggataatcaggatgtagctcactagttatagtacttgccttgcatgaatgaggtccttggttagagtccttagtactacaaaagccgagtatgatgcaatcccagtatccaggagacagaaggcaccctatcccattccgaggatggtctaggcaatcaaagaacatcaagggtaaggaagagacacaaatggtcactgttcccacagattacactgtactttggccacaagggaggactctagctcaaggactgtccctggtgtcctttcccactcagacatccccagataagcagcccctcctctcccctttgttaacaaaccaagtccaaggctcttgaatctggccaaggaggagccccagcaggctggttcagctgagatccctggggagtagataaggttttcacctgtaggaaccagattgtgagtaatagttatcaagaaaaaaaagaaatgagaccttgaaggaactgggaggatctgaagcagtacaagtttatagggtcctaatgttcagatcgcactaaactgtactgctgcccctggagccagaatccctgaagctacaatcacagtgaaggagtagaagctagggaagagctgagcagccaatccacagccagtcctacttctgagatcctacctcttaggctctgactttccagaacaattgagctctgagaatatagaatagacccacggtctcgaacactctccaggacttggcagaacggagggggaaaaacaagaacaacaacaacaacaaaaaacagtgtctcctataaagaactaaaaccatgtggctcagtagttaaaagctcatattgctcttacagaggaggacccaagcttgatccccagcacctgtgtcaagctgctcacaatcacctataatttcatctccaggagacccaattcctatcacccctgtaggcactagcacttgtataaattaaattaaagacacacaactgtttttaaaaagatttatttattattatatctaagtatactatagctgtcttcagatgcaccagaaaagggcgtcagatctcattacgggtggttgcaagccaccatgtggttgctgggatttgaactcaggacctttggaagagcagtcagtgctcttaactactgagccatctctctagcccaacatacaacttttatcatttacagtaaaccttaaacagctcaagagctgggcagatatagcactcatgtgacacagagacatataatttttaaaataataataaaataccatgaacattttcctggaaagaagtgaggtaaatagttattggctaagcttggcattaagtagaactgacgtttagtaatcaaatcagtgcaatttctttataagttttcttaaaactttcacatttcacacaaaggaaaaggattttgtagtttctgtagtgccttctgtctttcacagcgtcaaaactatagtttacaaagcaaaccaatgacaacatccataggtaaagaaggaaacagacatttaactgtttagcattgcttgtattggcaagtactcttacacgtatgcaccctcacaggtttgacagcatgcaacttaaccagctgcatctccagccccatactgccttttcacgtaggcatctaatatagctgaaacactgatgtttgccctttaatataagcaatcagctggatggcggtagcacacacctttaatgccagtgctcaggagatagaggcaggcagatctctctgagttcaaagtctgcctggtctacaaaggaggttccaggacggccagggccattacacagaaaaacctcccaaacaacaaaacacagagagagaatcgataagacttggtagaccttggaaggccccttttctaaagatgttcacgagggaggcattactgaaaaatagagaataattgaaaacctttcttccacagatggtgccatgaacccaactgattaagcaggcaggcagaaacgtgtcaccatcagctaccattgtgccctcatgcataaatgaagtcctgatggaaaacagacaaacaaacaaacaaacaaacatctctacacactaagccgaaaacaaatctataccaaactgctaaaataaatgggaaatacttaatttgagcctggctgttttgaaaattggaaatccttcttcaaaatgaaaatcaccgcaaaacaatctaaagtcatctacaggccaactagggtgtttgttgcttgccaaacttccaataaattctgcttgaaacctttgcgtttctgtgtcactgtttctcactaccccttccttgtcatgctaattatgctaattacctcgttttttcctttcctttcctttttggtttggtttggttttggtttggttggttagttggtttttagagacaaggcttctctgtgtagccctggctgtcctggaactcactttgtagaccaggctggcctcgaactcagaaattcacctgcctctgcctcccgagtgctgggattaaggcgtgcgccaccatgcccggcgaccagcttttttccctttcttaaaatgtagtctgggatgctgctggctcatgcctttaatcccagcactccagaggcaaaagaggcaaaaacctgtgggtctttaaattaaaagccagctgctcatagtgagttccagttcaggactacatagtgagatcctgtctcaaaataaactttaattagtttagttgagtagattaatttcttatattttctgttgcttttgttaagtgtgctgagaacacaaacactataacaatataaaaaacaaaactattaaagatctggtcattagctccggtgggtaattttttatttgcaagtttttttatagtaaaggtttttttttattttcaatgctatcccaaaagtccgccatacccaccccccccaatccactacccacccactcccccgttttggccctggggttcccctgtactggggcatatacagtttgcaagtccaatgggcctctctttgcagtgatggccgactaggccatcttttgatacatatgcagctagagtcaagagctccggggtagtggttagttcataatgttgttccatctatagggttgcagttccctttagctccttgggtaatttctctagctcctccattgggggccgtgtgacccatccaatagctaactgtgatcatccacttctgtgtttgctaggccccgtttttttttttaattaggtattttcctcatttacatttccaatgctatccaaaaagtcccccatacccttccccccactcccactttttggccctggcgttcccctgtactggggcatataaagtttgcatgtccaatgggcctctctttccagtgatggccgactaggccatcttttgatacatatgcagctagagtcacgagctctggggggtactggttagttcatattgttgttccacctatagggttgcagatccctttagctccttgggtactttctttagctcctccattggaggccctgtganccatccaatagctgactgtgagcatccacttatatgtttgctaggcccaggcgaagtctcactagagacagctatatcagggtccttctagcaaaatcttgctagtgtatgcaatggtgtcagcgtttggaggctgattatgggatggatccctggatatggcagtctctagatgttccatccttttgtatcagctccaaactttgtctctgtaactccttccagtaaaggttttttttaaagatttatttattatatctaagtacactgtagctgtcttcagacacaccagaagagggcatcagatctcattacagatggttgtgagccactatgaggttcctgggaattgaactcaggacctctggaagagcagtcagtgctcttaaccactgagccatctctccagcccctataataaagttttaattttaaaaaagaagatactttaagaagttagaaaaaaatgaagagtgcattgcaatcactcttgccttaccaattagaagtatttttccagatcacgtcaccaattataaaaatagaaatcattgtgcttgctgttttacaataaatattcaaacatctaaactttaaaaatgaataagtctggtgaggggaaattgctggagtgaggtacctcggtgagtggctgaaccagtgagggatcttcattatttgtaaattccaaattttaaaaattttatttatttttattccatgtgcattgatgcttttttgcctgcatccatatctgtgtgatggtataggatcccttagagctgaagttacagacagctgtgatctgtatgtggttgttggtaattgaaactgggttctctggacctctggaagagcagccagtgctcttaacctctaagccatctctctagcccccaaattctgaatttttaaatatccatatagtaaatctctgatttcgttgcaaacaaacaaacagtggtttataggaaagggcttttattccttatcagcaattaaacagtcaagggttggtttggggtggagtgggggctgggggcttaagctgttctaaaccaagtgatggttcagcacatttactttttgaactctgacatgaggagctcttgccttacatggtacagttaaatctccttactacaagccgggcgtggtggcatggtggcgcatgcctttaatcccagcactcgggaggcagaggcaggcagatttctgagttcgaggccagcctggtctacaaagtgagttccaggacagccagggatacacagagaaaccctgtctcgaaaaacccaccaaaacaaaaaaatcttcttactataaatgggtagagtatgcccggcccctttcttcctgaatcagaaaacagctggaaccaagtaaacaccagtttttctacttccttccttttctcactttgtaatcttctattgttccatctatctgggggactgttactcagccgatgccgtgatgcggaagaaacttgaagtactacaattgatattataaaggattttctactagacttgcttaggagacattaatgcacacaaagtagaatttagcaaggaactgctgcctccaaacgtatgagctgtggagtcatgactagcttcacctagatttcaaaggattcctccatgagttttgagagccaagcagagaaccagaggaaggctgatataaagtctctaccagcacagtgcttagcgacttttgcccagagaatagacccccaatgagagcaatgcccaaaagagctatgaaaacactgctctcagttatgacgccagagctatagagccaccagtatgcaaaaacagcttgggagaggtgccagcaactggttccgactgacaagaagtgctgtgtcagcgtgcctagcgaggcaagcttagagccctgtgaacccaaatggcgctccgtgtgtctagaggcagaacttggagccaaagtttgctcttgagccttaagatgaagtattaccatgttggggtgctgctcctcaggggacttatattcagtccccagatgtctcaaaattccctgtaactctagctccaagcgatccaatactctcttctggcatactccagcaacccaccccctgtactgataaatacaagtaaaaatcttaaaactatatttataaagagagaggggagagagagcaatggcatctagaccctgggatccatcccctcttaggggaatatgttggtgtacatacctttaatcccagcagtcaaaatacagaggcaggtgaatctctgatttagatgccagcctggtctacctgatgaattccaggccaatcaggctacatagtgatagactgtctcaaacaacacaacacaacacaacacaacacaacaccaacaaaaccttcccctattgggaggagctgatgttaccccacccctccctggggggtctatagttggtgagaaagggagagaagatctgagtgtgtaactacttgtagggagtccattctcctacaaataatcccctcacccaggactctgaaagcaactgtaatgaaacactttggagcacgtgcgcacacagaacgaactcttgccctgccatgtctggggcttatttggcgtaatttatccctttcttctttcctatttctgacttttggaataagtatgtctacctaatgtctgtctcaaagttgtggttttagactttttaaagatattttttgcttgttattattagtgtgtgtgcatgcacacatcatgagtagggtgatcagatggtgcacggcttttgtcctaccactcaggaggtagagtcaggaggatctttgtgagttcgaggtcagcctgactccagaattccaggatagccagaactacaccgaaaaaccttgcctcaaaaccaaaaccaaccgaacaaaaacaacaagaaagataaggcctttttggatgtatttggtaatgcctccatgactcgattactgtccctgtccttgtaagaacagctaaaagtacactcctggttgtgtcttttgctcttccatttcttctgtcttgtgagagaagcacctctgtggaaacagggatcatctgcatggcatgaaatctgctatcactttctaccttctagcacgtggaaagtcagtgggctatttttgaattatcgttctggacattttgtcctggcagtaataaagagtacaatacagcagatatctgaatttctttcttaaaaaaaaaaaaactatttttttcctgagtacactgtagctgtcttcagacacaccagaagaaggcattagatcccattacagatggttgtgtggttgctgggaattgaattcaggtcctctggaagagcagtcaatgctcttaaccgctgagccatctgtccacccccatccccctttttaaaaatatttatttatctttattttatgtgcttgggtgttttggctgccatacctaggtaccatatctgtgcagtgtccacagaagccagaagaaggtgtcaatgtcccctaagaactggaattatagatggttgtaagccaccatgtaggtgctgggaattggactcaggacctctagaagagcagtcagtactctttgttttgttttgttttttcgagacagggtttctctgtgtagccctggctgtcctggaactcactttgtagaccaggctggcctcgaactcagaaatctgcctgcctctgcctcccaagtgctgggattaaaggcgtgtgccaccacgctcagcaaaactagagttttctttaaaaaggatctaacacagtatcattaactgtagtgcctgtgctatgtatacattagatctgtaaaacttatttatcttgcatatcagctatttgtatctttttaattagtgtatactatttgtacaaagtaaagatttcattaactatttccataatgcatataacataattgcatattcacccctctattactcttttttatccctcctacttttcctcatagtttggtaaaaaccagtccagcaactaataaataagttggtgactatctggatctgtttggttgtacactcaatcagcctatcactcagcattttgtataatggcagacactatcttcaaacacttacctacctcgcatttcctgacacttaacacatggaaaaacagcaaattctagactttagctaaacattgcaacacttcagaagtttctagctaaccaacaatagtcagatgataaacagctcaattgattttagcattatttgagttgagaagtaatgtctttaaaaggaacctgccaggtgtggtggggggaggaagatggctctttctgagttccaggctagttgaggctgtatcgtgagactctacctcaaaaataaatagctagcagataaaaacatgcctttaaaaatactaaagataaaaaagaaagagacagaaaggaaggaagagatacagacagagacagagacagagacagaaagaaaaagtgccaggcagtgatggcacaggccttcaatcccagcacttgggaggcagaggcaggcaaatctctgtgagttcgaggccagcctggtctacagggagagttccagaatagtgagggctgttacatagaaaaaaatgtgtctccaataagtaggtaagtaagtaagtaagtaagtaaataaataaataaataaaaataagcaaacagataaagatatatgttctttgttcccgaattttatattgtctgcttagcacagatacgatacttcttaattatatttttgactgtctaaaaataaaatttcttttaaaatctttctttccaagtaaagctactacttgaatattgtaagaggttattacttcatgacttttacatcatatacatagaagatgaggtcacgaatttatcaccatgcttggttgttattctccttttctttatttctttacttattatttagaaaaacagtcataatctggccatcttttccaggctggcttcaaactcctaattcttctgtctcaaagtcctcagttctgggattacagatattcatcacaatattcatatataacacaaacacacactcagctgaaggtagaattcttatttctattttatttggttttcattttgttttgtttcattttgccattttgtgatttgtgtttttgagacagggtctttttgtcgtggtcctggatgaactggaactcatattttagaccagattggatttaaattcagagttctgcctgcttctgcctccaaatgctgggatcaaaggcatgttctaccatgcgcctaccatattttaattttattcgcttgcatgtgtgcgtgtgcctgtatgtgtgtgcgcacgcacatatctgtacgcatgcgcaaaatgtgtgtgtgtgtgtgtgtgtgtgtgtgtgtgtgtgtgtgtgtgtgtgtgtctgtgcgcacgcgtgtgtgcatgtgtgtgtgttcatgcgtgcgcacgtgtacccgtgcgtccacactccgccagcacgtgtgctagcttgcaagttttcagtttgagtacagacaccaggccatagcccaatggcagcagtgacagggaggaccgtggcagcatgttacaatcagaagacaacttccggattttcactctgtcctaaaaaggtaaaacgcttaagctcacttttgtagaaaagatgcggtgatttatgcctacacctgactttattacttatgtctatacatgtttgctttttactgtgaatttaatagaaaggagaaagttgaggctctgtctgggcaatagtcttttgttcacacatgctacagggttacctagacaccaagtgttttcttgctcagtaaagataatttactttgttttcaaaaagcctccaagtagggatgtttaagcgtctgtttttctcctaaggcctactatggtgttccagtgtagtataatttgtggtataaattgtaaatgattgccatttctctggaggttatttcttatcaagaattccagcaggaggaagtgtgcagactcttctttcccactgtcatgggagtctctgggacctattagtcttttttctttctcttcatttctttctttctttccttccttccttttttccttgctttttttcccccccagagacagggtttctctgtatagccctggttgtccttgaactctctctctctgtagatcaggacggttttgaactcagtgatcctcctgcctctgcctcttgggtgctaggattataggtgtacatcactatggtccatttgtcttcttaaaggtagtgttgtgggccagtcactgtccactagccctccactcaaccttcctttcacttccgttacacttcaggatcagtccaggaacaatagagacagatactcctcctcccaccccacccaccagccggggcacctgaccactgaaggacacaaaaaacgagttcaaccagacccacacctttaaattccagcacttgggagacggaaacatttccctcccacctacagtggaaagacctattccaagagacagagactcgaggaattttacttgtcttgttcgtaaacaagcatgaatgacctatctaacttgtcatctgacaaaacaccgaagcaaattgcattaagccagactttcaaaaatactttagacatttagtcttgcatttagttacaattaatttatttagtcttgcatgacccaggtgagccttgacacgtcgaatacatggtgaaaatttgtgtcaactttgtgtgtgtgtgtgtgttttggtttagtttggtttttgaaacagggtcttatgtagcccaggctagcctcaaactcctgatcctcttatctggatcaaaattctacaatttgtaattttcacacttacaaagaaagaaaaaacttttaaatgtatttattgtgtgtgcttgtgtttgtgatgtacgcgcactcatgtgtgtgagctagtgcatgcatgaagaggctgttaccgtgtctgcctgtttgccttgttaatcctccagtctctgctagcctcagtgctggacttatagggatgcatgggcccacacttagcttattatataaaagtgttaggactcaaactgtggtgttcaggcttcctccggaaagcactttgaatcattgagccatctttccagtcctcagaattttcttaagtgaagttgtgtgatatttaggtttaatatccattatttaagtcacttatgatagttgatgttttgttttgttttttgtttttttgtttttgttttgagacaggttctcactctgtatcccagactggcctctaactgatgatgtaagcgcatgctgatgttgaagtcatagtaatcaccctgccctccctctctctctctcctgaacatgggcattacaggcacgagacaacacacctaggttcaacttttttaatttaaaaaaaaaaatgcagccgggcagtggtggcgcatgcctttaatcccagcacttgggaggcagaggcaggtggatttctgagttcgaggccagcctggtctacagagtgagttccaggacagccagggctatacagagaaaccctgtctcgaaaaaccaaaaaaaaaaaaaaaaaaaagaaaagaaaagaaagaaaagaaaaaagaaaggaagaaaaagaaactgtggcatgaaagttagaaagatgttttagtttttagtttgctttctattactgtgataaaacattctaaccaaaaatacattgggtaggaaaggtttatctggcttgtacttccacatcacagtagaaattagggcaggaaccacaaaggacagcttcctggcttgctccccatggcttgctcactttgctttttcatacctcccaggaccacctgtccatgggtggctccacccacatggtttaagtggactgcccccccccccagtcgatcgttaaccgagaaaatgtcccacagatttactcacaggccaagctgagcacagggtaccattttttttatttggctaattaactttctgattggagttgaggctcacttgctaggagaaagttcatgccttgtcaaaagcctctagctggggagaccataggctctaatggagaagctttaccactattgcctccctagctggccaccttatgactatcaaattgtcttctaaccatgtatgtttatacctgtagatttgtgctactgtcagctttggtaagactagtttctgttcgtgcagacttttagctctgagtcataagaatatgtgattggctgggcgtgcctttaatcccagcactcgggaggcagaggcaggcagatttctgagttcgaggccagcctggtctacagagtgagttccaggacagccagagctacacagagaaaccctatctcaaaaaaacaaacaaacaaacaaacaaacaaaaaagaatatgtgattgtgtgattgttgaagatcagccctaatgggatctgcatctcctcccttgcaaggttcaagaaacaccacagcaaagagggcagaaaggtaaagctggaagaagggatggggtattgtggaacatacagcagcagtcatactcataaactcacagcacctatgattaccctacccaaggcctgtgtatacaaggggacccccacattccttaggatgtgtaggaagttaacagttgctacaagaggctcacaaggcctcatccctccccgaggaggcagttaacagtgtctagacgtaagggaccaagatgcctcattcctccctgcagaaggggtattagtagttattgtttgctgagggagttgggagggggggatactttcttcggtaagaatctgccatgttcctgtaaataacccttcatccatgctatagaagaaaccagaaatcagaagtgtgtgagcagagtaaggggatcagtaaaagtgagagggagaaaaaaagagagtaatgggagtgaataggaacaaaatcttacgtgtatgtgatgttataatggcactcatattgtatagaatataccctaataaaatgtaaagggttttagctgctactgtggctcattcatgtaatcctagcacttgagaggatggttatgagtttgaggccaggctgagctacatagtgagtttcaagcagcccttaaaggatttttgctggaaattgcaccttatgcctataatcccagaactatagcaactgagggaggcagactccaaattcaaggtaagcccaggctaaagatgaggccctattaaaacagatgaacaaacaaacaaaaaaatctaggttttgtgttctggagaggcaaaatgaaaaccaataccttatcctgctctgtgtaaaatgtgacgtttggtttcccccaaggtccattggacaagagctgttctttttcaggattattttggctgttcatgggtcttcacgcatctatatgtattttatagttatttttgctacttccaaaatacaaaaagaaaacaaacaaaaacccattgggagtgcgatagatattgattgactctacagatcactttgaacagaagtagtattttaacaatattaaatgttctagtcagagcaattatctcagattattttttgttatagcaacattcctcaacctagattaagtcatgaatagtaaagataaatttaggtcacaattctggaaacagagacattcaagactgtgctggccaggattttctcagtttctggttggaagcagtgttaactcataggagagttgtggtagggaaacatctattttgtccagtataatatatgcacaagagctatcaggtagatgctaggatcattttatagcaacctcttcttaaaatccaagaactcagctaggctcttgagaaattaattaaaccctcttaaagatgccaccacatttcagcaccaagacaacatacaagttgctaggagtaaaccatatatttaaactataacaccaagtttgctgtagtggcttgcacctttaatcccaggactcaaaggcagaggcagacagatcttaaataaattggtagccagcctggtctacatagtaatttccaagccagccagggctgtatcaaacaaaaactcaggtcttcaaacttgggggcaagtgtttgtaattgctcagccatctcagtggccctcaattcacttttatatactcattttgtatcctataactttacagctgaattacctgagttgtatggtgtgtgtgtatgtgtgtgtgtgtgtgtgtgtatgtgtgtgtagactttcgtaagtcccccacataaataatcatggcatttgtgagcagagtactccagtcagttacaattcagatattaaaaaaaaaaaaagtaataaagtaaaacagggtctttagcccagggtaacgttgaattgtgatcctctagcttctacgtcctgagtatcagggtcataggcttgtaccactattgggattgcacatagggctttatgcattctagagaaaagcattctacagactgtggtacagtcccagccctggattccttttcttccccaactgttctgcacaggaccatcaattctattaggattggaatctaagagagcaaacattcttggttccttcatcttattaaagggaaagcactcaatttttcaccattgaccatgttagctgtgggctttttcaatgtggcccttatgtactcagacaatttcctcctattcctggtttaccgagagtttttaatcatgagtacactgagtttttccaagtgttttttttttaatttatttatttgttatatgtaagtacactgtagctgtcttcagatgcaccagaagaaggcatcagatctcattatggatggttgtgagccaccatgtggttgctgggatttgaactcacgaccttcagaagagcagttggtgctcttaaccgctgagccatctccccagccccgtgggtttttttgtttgtttgtttgtttgtttgtttgtttttgttttaatgctatcaagatgatcgtcattgtattgtggtgatatcgtgttcattgatttttgtatgttgaatcattcttgcattccatgagtaaatcccacctggatattttaattccatcaaactcgggttatggatattgtaatgatgatgatcatcagggatgtgggctataaatttttaactttcttttgtgtctctttctggctttgatatcaggatcactctggcatcatgaattgagttagatagcatcccttctgcttcggctcttgagagattttaagcattgactgattgtaaggtctccttttgcaaacgtgatttgagtttgttattggtgtagcttagtttcatcagcttcttaaaaaaaattttttttcaagaaaaacagcattttaaaattttgtatttacgctcgagcctttgtcatttctgttttctgccaaggttttcctgcaggtggtggtgactcagagattccttccttaggaatgcgcatctgtaactccccccaccccccaatacacacacctttgtgcggctttagcttcattcattccattaggttttaggtattatcttgtatctttatcccatttccagttgtctcctgatacattctgcttgtctggcattgtttgtctctttattggtagagggagattctccccacgcattccaggcagcctttgagcttctgatcctcctcagccttccagatttgggggattgcagagatgcaccgccaatgacaagcaaaatccctaactaaatcccttcccctcacaccccatttgttcttctggagtgtgctctgaagtgttagcttccaaatctttatgaatgctcacttcttaatgctattgattttgagcatcggttgtgttgatggtgttggtctcctattcatgcatgttgtctccgatcaatgacttctctgcccgtgaaacgagactattcaagtccgattgcattaaaggtaggcttattggggaactgctctcggggagttcactggcttcaaggattgaggagttgccatggggagaggggagaggagaaaagggaagaaggggtgcgctcgtgcagagaggagaagggtggggcgcaaaatgtctagataacattggaaagaacgtcttgtggaagggcagctaagcccctgaactggaaagttcaaggttgggaacaaggtatatcaggcagggactgaacgctgctagtagaacctggaagccaggtctgcattgatatgtaaaataagcacttctgtcccttgtccgggggtcaaaaccagtctaccgttttgttttgttttagcacttttaccatgttaatcataattagatgtaccatctaatccttgcagatgtctaccacgcctgaatttggttctgatctgtattttctagctgagatttttttgttttagtaagctttacatacagtgtttgatgtggttgaaaatgagggctataccatgtgtccactgtttgatacagccagagggatcccaggttggagaatgttccaagtgtctttatttttcctaatttgttgctttggttgctctagagacttcttgaattagttctgagttgtatgacacgttattgtatttctctgatattacaggaggccttgatggtggcagggtgttcattagctgtatctatgccactcaactgtggtcatcacagcgattcttcttgggtcttgtacagttttccttcccgtcggttaagcagaagcgtggtgggctagaattgggcttttttttccctcccttcaggtcggtttgagtcttatgaaagctaaggtggggcaatgttcgagctcaggagttgcatgtcagcctggggattaagggactcagttacttgaatttctaatgagtcacgtttgtctgaggctgaagctaggagagcagactgctatgggggtgtttcagaatgcttccttttctctttctgttccaatccctatggagatcattttcactaaaaaacatgctctagggctcctatgaagaaaagtcacaaaagtgtattgctcgctggatatagcctggattatcttattattaaatttattcaaacaaaccttccaagaaagcgtcagtttgttttcctgtgttcacactgtctgtggacaggagctgttttctcactcatcagcaagtcgctgctctctctaagagactttgtaatttggggaatgttatttccctgatagagtcgaagaaattgttcattttattcaattttttttgtgatgctaaaaatatggctttggcctggtgtggtggtttttttaatggtgtttttgtttttaaataacacactgggtcccgtttgtgccaaccaaccatatatgcatggagatggggtcatccattgcaggttgatggatctatcagagggccacaccattaactcccaatggctcctcagcggtagatcgagtacctcccctagtattggaatcacagctgctgtgagctcctgagcaccggtcctgtcactgctgcttaacccccagcccagatggcccctgtcttaagtgattttctctgaggtttgcatgtaactgtgtgatatagatgctccatttagaactgagcacccttcacactctacagatactattctctccattttgaccacatcaaagccctggtcactacacaaagaagtgtctctggggaggtctgagagctaccctaatccatgggtctagaagtattcatttaaaagatcatttatttgttcgtttctttatttacttaatgtatatgtgttctctgtcttcatggacaatgaaagaggaaattagatcccattgtagatggttgtgggccaccatgtgctttgagccaccatgtggttgctaggaattgcattcaggtgctctggaagagcaagcagccagtgctctcaaccactgagccagcctctcccgttggaggtctgtatttagagaggagttagacgatgtgtctgataagcaaaataataatggatggtccaccactatcaccccaagggtctttgagtgtccaagttgtgggttcttggtcagatttacagcacccattttttttaactgtctttttaatgtttcttttatgtcagtatttacaagtataaatttcctattacaactattactccatgctacaacttctggtctgctgctactttgagatgcttttatccatcttcatattttataatttcccttctttcattctttggatgtttaggcaaattgtatttcgatgcatttgtgaattttccctatatctttttgcttttatttctagtataattctatgtggttaagttctttttttatttttaaatttgtttttggagaatttatgagagctatattcatattgttttccctagaggtatgtgtataaagatcatttatttacttgtttatttactcaatctatatgtgttctctgtcttcatggacaatgaaagagagaatcagatgccattatagagggttgcgggctaccatgtgctatgagctagcatatggttgctgtatacatgtatatatgtatacatgtgtgtgatgtgttacaacttgctgtgtttcaattcaaccttttaatatttatcgaggacctctgacaagaagctgtgggactgttggaatgagtttccctaagagtgaaaaaagaaacatatgtaaacaaaatagaacggagctaacagcccaaaaatgtatccatgctaatccagtctgatttgaaatgcctttaattggagttacatataaactatagtatagatcactgcagaggactgcatccatctaaagtcatccaaggtactacaaatatttgtatttgtaaaaatatgaccaaccaagctcctttttatggctttaagtctgtagcacaaacctgggcttatactgccacctagtgaccaaatagcaaaacaccaaacactgaacttgtttttctggagtctagctgaatagaggctggctgaaaaatggagcagtctaggtagaattctatcattgcagaggatactgggccagcaccaggtttagcacatcccgaggaaacacttggtttttgccctaggatacagtcttccctgaagaccgagcctacaatgagaagcttgctttcctactgttatgcctttgtattgttctgtgttatacagtcagattacagtatcactcaagtcttttctttggttgactatcttctgtctggtcttctggatttccaggagacaattttgttttgttttatttttttgtttttcgagacagggtttctctgtttagccctggctgtcctggaactcactctgtagaccaggctggcctcgaactcagaaatctgcctgcctctgcctcccaagtgctgggattaaaggcgtgcgccaccacgcctggctccaggagacaattttttttttttttttttgcttattcactttacatcctgctcactgcccccaactccaggtccccccctcccatgatccttcttccttctccctcccattcttctctgagctggtgagggcccctgggtatcctcccaccctgacacatcaagtttctgtgaggatatgtgcatcctctcctactgaggcccaccaggcaactcagctaggagaacaaatcccatggacaggcaacagcttttgtgatagcccccgttccagtgttccagtagttcaggatccacatgaaggccaagctgcacatctacattatgagcaggaaggctctatttttcttatgtacaaatcttaaattcctatttgtttaccaggtcatttttggttgtcactgtgacaggttgaattttataatcttgccacttgggaaatagattgtcctttctttctcagagttttgaccccactgctcccctcctccaagaatgaacaagtttatttgtgtcacttgctacagcaccttcagccagtttctgcctgttacataattatcaccaggtctgttcccaagcaaactctcactcaacggagctagataaagatggcttccagcagcataacgaaggctcagttctgagacctatagaatgtccttgcaaggacaccctgtgtgggcttgtcccataccaaagatttctcacacgcccattgctcatttacttgaagtgtgtttgcatattggaatttgaggtgtaaatttttataaaatccgcattctttgttgtgtgtggccatgggggtctgttttctagacttgacagaatttccttaaagatgtgatacaaaggggctgaagagatggctcagtggctaagagcactggctgatcttatgaaggacttaggttctgtttccagcacccacatggcagctcacagctgtctgtaactccagccccaggggatctgactcaagcatctggcctccacattactagccatgcaggtggtacacatgctggtaattaccaaaacacataaaaaagaaacttcaaaaagaagggagacaaagctatctctccagatgggctctatgttcgttgaaacacacttttaatacccagaaggcagttttctgtttgtttgtttgtttgtttgtttttgttttgtttttttttgttttgttttttttttttgagatgagacttctctgtatagccctgactgtcctggaactcactctgtagaccaggctggcctcgaactcagaaatccacttgtctctgcctcccaagtgctgggattaaagtccaccactgcccggcaagcaggcagttttcaatgttgtcctgtccttcaccttactgcctttgtgaacctagaagctggttacaatcagattaaggacttcaaccttttccaccccccctttctcctgaatatgacttgagtaatgggcacatagatgactttgtagttcccccagaatgcgtagaaacaaaatttcaaagctatcttcccctatcgtcacctcaaagcatcccttttgctggctttgactatgttgtcataacctagataacaacactataattaatttttaaatgtctgcctgaggaagttcatgtaagtggatcaatcattaatgccctgagttgatcttctgggaggcaacaatcagaacacagactcacagttatgtccacattttccactctactccaagtaaactccatcagcaatatgagctgctgaccttcaaatccacctccatgtacttctgtttttaaagatttatttatttattatatctaagtacactgtagctgtcttcagatcacaccagaagagggcatccgatctcattacaagtggttgtgagtcaccatgttgttgttgggatttgaactcaggaccttcagaagagcagtcagtgctttgaactgctgagccatctctccaacccctccatgtacttttgattcgtgcagctttgtaggaagttccaaaatcagcacatgtgtacacagtgccttttaaacctcttaaattctctgcagatctctctatttcttttcaagtcgttggctactttagtttattcagcagggactacctacacctacttagcagcccgctgttcccctgcagtatactttctctttccagagttttgatcactgctatccaaatgcgctcagctatttgatttctgactccagatagcgttcagataagtgtagaaagtaatgagcgtgatatccctagatctttctccttcccgaaaaaagaaactgcttcctccaacgttgttacattccaccagacagagctagagcaaggaccaggaaaaatttcacaaactttccctgcggaaaagagggccttgaacttcctcttctacttaacctagcaccttgtctctatcgccatcttgtggactttttgctacattacagagctttgaatatggggattctggggccgaacatgtttgttattgaaggcttatactaaactttatatgccccagtagaggggaatgccagggccaagaagcaggagtgggtgggtaggggtggagggcggagggagggtatagggaactttcgggatagcatttgaaatgtatataaagaaaatatctaataaaaataaataaataaataaataaataaataaataaaaaagaaggcttatactgctagcacttgaatggtggaggcaggagcatgagttgaacaagatatcccaagcttcctgagattcccctccctcaaacaaacacctgattctggcaaatttttacttttgttggacatatgagtactccccacatgcacactgcctttcccctactctattgacttgtgttttaacattaacttgtaggtattttatacagggcatgatgttgttatctattgttgactggttagtcgttttgttttgttttgttttgagacagggtttccgaatgcaacagccctggctgtcctggaacttgcattgtagaccaggctggccttgaattctcagagatgcatctgcctctctctgcctctctgcttctgcctttgcctctcaagtgctgggattaaaggtgtgcatcatcaccacttggctttactttatatagttttaatgtaatgatttctcaggtatatttgaatgtactcatttctaaagtgagtatttccctttggttgctgttttatatttttcaacttcaaactcttcattttattactttttttcctgccaaaaattactccaaaaaacaaaataggaaaagcatacaataaaacatttaataaccacatcccccatatgctaagtaaggagagagctacagtcaacagtttacagactgtggatttatctctgacaccaatgattctcagcatcaagaaaactttctctgcaaagcatatacagggcaaatattgagcacaacgtttcacaagttcaatgggcctcctgaagtcgattcatgaccttcattttcaaaagcagtcccctctccccaaggaccagtgaccatggcagaagaagaaacagactttgtgatgtataggcaaagccggaccagagcaaaacaaaaccttcaggacaggacattaactgctgtacttgtgaactgtagctgcctgaataagcttgtgttaatcgccattccaagcataaggaagcactatttagagttgagagcttttgggagagggacagtcacggttttttgactccttggtaggcacaccaccccagtggatggttcacatccaggcattcacgtgcagcacaaattggacactgtgggtaatttttttttaatgaggagattaagttgagagagggtggcaggtggtggatctgcaaggggttagagaaaggaatgggggtgatatagtacacatgccaaattctcaaagaattaataaaaatattatttttaaaatttggtgatagtttctagaaatcagtatgttttctcctgtacatcctagaaatgctatcttctcacagtcaacttttgttaggtaatcaatgttatcagttaacaactacttataatactaatcactagtagcatccatctttaaaatattttattaaatattttggagtattactttctatcttctaaaggtaaaaaaagaatgcattccagtaacaacatatgcatactggtcattttcgttcatttgaagaaatatgaatgaattgggcattgatatttaaaagcaaagtatctcactgttaaagctttaaattcctagaaagctcaataatttaataattttacacacacaattgttttatggttgttttcgagacagattgttgtctctatgtagccctgactgtcctagaacttgttctgtacatcagactggtctcaaagtcagagatcctcctgcctctgcctcccaagtgcaggaattaaagggtctcatgcatcctagcctggcctcaaactcactatatcgccaaagaggataaccctgaacacctgaaacgtctctctctaccacatacacccaagtgctgcaattacagacctgtgccaagcacacggaacagtagacatactaagaacatggagctatttcagtatacttggcaaaggtaggtgattagcttgggtgcagcttcctgtggccttccatgaattttcatgaatgggcttcttgaatttctactgagaattgatggcttctggggagaagccattttccatcatttgtttcagttcaaagaactcaaggaagaacatgaaagagctccattccagcttttcctcggtactttcttttgtatgtgaaagatgctagaattcttttttgtttgtttgttttgttttgttggtttttttggtttgtttttgtttttgtttttcgagacagggtttctctatatagccctggctgtcctggaactcgctttgtagaccaggccggcctcgaactcagaaatctgcctgcctctgcctcctgagtgctgggattaaagcgtgcgccgccaccacctggtgaaaggctctaattcttttaatatttcagacctggatggtatagagggcttttgccaaaatatcacattcttggggatttttgtattcattttacttgaagaatctgcctttttcactcagagggttttttgtttcctcccttgggctacatcctatttctttgcaaagaagttctcctcattttctacttttataaaatttgtatcacataccagcaaagctttggggactgaaaattgacattggggttaaaatgatggtacagtggctaagagcagtggctgcatttgcagaggacccaggttcgattcccaaacactcgagtaccagctcacagacgcctgtacctccagctgcagggagatctgatgctctcatccggcctctatgggctctgcacacacccacacacataaaataaaaatatttttaaaaaattctttgaaaaagaaattgggttattatgtggcaggaggattttcttttctgttccagtctaattggtgctctataagcttcttgtgtgcttataggtatctaggtgtgtttataggtatcttgtgtgtttataggtatcttgtgtgtttataggtatcttgtgtgtttataggtacctaggcagattgctcagtttgcattgatactgactgttatacatttttgaaatttggatatgtacagtttaaggaaaatttttctctaggacattaagtctcttgtcaattgaaggagaagtatatcaatccattacagtaggtttccctcaaacccagtctttgagaccgtaagagtttaagagagggggcaggaggaggcaagactggggaggaaagggttggggtgcaggcagtctgccacaaaccaaacaaatgagactgtgttggagctgagcctggcagctttggtctctgggtttccagcattccaacactcaccaagggccattcgaccaggcaagctgctacctgctggcctagctttcccagctctcaaaggcaaatgggctcaggttgcagccattcttttctgtgactcccacaaggtccatgctctgttcccctaagctctgccccctcttctctgcgcaggtggtcaagtgtgctaaccacaccctctcagcaggatcccgcgcctcaagagccttaggtcccgccccacactccctcaaaccctcagtgcagcgcttgtgtcaggcgcaatctcgcaagatccggtgaggcgctacgtcgtgctccactcggtcccaaaagtacctgcaagcgctacacacttgcgctcggcgcccttgctctgttctcactttccgagatatccacgcatcttgagtcctgcatccactcccgggaggcggctgcggcaagcgcgtgatggaagaagagcgtgatagccagctagacaggtggccagagcggagcggtgggtgagatgcgggctaaggagagggcagatgcctaaagtgctgcgggacggtggagaggtgcccgaagtccttgttggggtggtggagaggtggctgaaattcttgcgggatagtggggcgatggctaagtgcttgcaggacagtggggcgatggctaagtgcttgcgggacaggggagaggtggctaagtgcttgcgggacagtgggacagtggcaaagtgctttcaggacagtggagcgatggctacgtgcttgcgggacagcggaagagatggttaaagtgattgccaagcagcagaaagattcctaaaatgcttgccagctatgcggagatgaaggtaaaatgcctgcgtagtcccgaaccgatagttaaaatgcctgccgcataacggaggaataactaaaatgtctgctgggtcctggagccaaaatttaaaatgtctgtcccttacaggtggttagactaccggtcagggacctggaaagatagcttacatacatgccacgttcccggactaatggcttaaatggatgcctgggactgggaaactttactaaaatgcctaccaccggggacctgggctatcactaaaatgcctgccaccgggtactgggaggtcactaaaatgtctgccacggggtacttgggctatcactaaaatgcctgccaccgggtatctgggctatcactaaaatgcctgccaccggggacctgggaggtcactaaaatgcctgccaccggggacctggtaggtcactaaaatgcctgccaccggggatctgggaggtcactaaaatgcctgccgtcgaggatctgggctatcactaaaatgcctgccaccggggatctgggaggtcgctaaaatgcctgccaccgcttactgggaggtcactaaaatgtctgccacgggggacttgggctatcactaaaatgcctgccaccggggacctggtaggtcactaaaatgcctgccaccggggatctgggaggtcactaaaatgcctgccgtcgaggatctgggctatcactaaaatgcctgccaccggggatctgggaggtcgctaaaatgcctgccaccgcttactgggaggtcactaaaatgtctgccacgggggacttgggctatcactaaaatgcctgccaccagggatctgggaggtcactaaaatgcctgccaccggggatctgggctatcactaaaatgtctgccactggggatctggaagatcgctaaaatgcctgccaccggggacctgggctatcactaaaatgcctgccaccggggacctgggctatcactaaaatgtctgccactggggatctggaagatcgctaaaatgcctgccaccggggacctgggctatcgctaaaatgcctgccaccggggacctgggctatcactaaaatgcctgccaccggggacctgggctatcactaaaatgtctgccactggggatctggaagatcgctaaaatgcctgccaccggggacctgggctatcgctaaaatgcctgccaccggggacctgggctatcactaaaatgcctgccgccgccagggacctggggagatcgctaaaatccctgccttataaccaacccctagaggtcgactaaaatgtctgctgggcagagcagaggtgatgaaaatgtctgggatagcgtagagatggttggctaaaatgttacaggtagatatgcaaagcgttcaataagcctggcgtgggtaataaactgcagtctagagcggaaaagaaagttaagggcgtgacttgtagcagggtctagaatccacacactcacatcagggaaagcctcgtgtccgaaaaactctttggaatagtcttaatattttaatattgctcaagccaaattcagcaatactacctcaccgcacgtgtctttttcaggtaagatttttgctcttttttttttttttttggtaacaattttcccgccatgtgattatgctaaaaaccaatgggattctacctccgctttagtggggttttctgattgtacgcgtttggattaaagttgatgaaagaatgtggggggggggcacagattcagaaaagtggaaaaattactggtagcgtgtgaagtaaccaagaacgagtaactaagtctgcgataactttctttgagaagccttggaagttgagacctaaaattttggtactgcgttccgtttatttccgaggtacataatgacccgatctctggtatcgttgaaattcgaaaataatctgagtgctttgaaaacccattaagtttctactatctgggacaaggagtattttcggggtgggggtggcgggcaaggcaaaacaattctcagtggttcgtatctgaaaaatcatattcttatttactataggcacggaaaatccctcccggtagtgtttattcagtgtgttcagacgagcaaacaatggcactaaggaatgaatccagtttagaaaggagggaaattaacaatcagctttggttttgatgcggatttggggtgaattttgtttttgttttttttttaatgccttatttctgagacaaggtctcagtaaataacctcaaactcgcaaagctctgcctgccactgccttcagtgggacagtgccgattttaaaggcttctgccgccatgtttggattaatgttcagttttcaattcggaagagaagaaagatttgcaaagtactgattttgtaatacctatgcaaattcttacctgtgttagtaggcagacaaacactgactccccagaatatactaatatactatattacattggaggaagaaactgaggtttctaatcaatcgaccttgagataaaaagattcccctagaaggtaaggtgttgtttcattgaaatggcagggataaaagattgacaaagactctacatcggctatagacatagaggaaggcaattactagctaagaaatttgaagctaaaaagggcagggaaatgaattctctagacttacagaaggaataatttcaatttaatttcaaataataatttcaatttcaactaggtgtctcacactgaacttctgacttctaaaattataaggttatagatctgtgttgctttaagccaccaagtttgttgggggcttaaacaaatacagcactgtagtgctacctgtgtctctgtatcttcgtagaggttaaggtggttatgaagacatccagaaaaggaatcatgagataggctaaggcacagagtatgtcttttatttacagtttctttgtagaacacctttacctaatgtcttaatcagctaattagcatagtaaaatacaactttgggtagttagagaacaaatagtgtgtcatagctcaagaggctagacctctctaaaatggaggttgggtctggtgttatcccttcctgtcttcctggattgtgaatggctgccttctggctgccctgcgtctggtaaagagacagacaggtttaggctccattcttaagacctcatttgatttgaaattacgtcttttatttaaaggttttatgtacatatgcagtcaaattcgaatggtttctttcttgcgcttgtgtgtgtgtgtgtgtgtgtgtgtgtgtgtgtgtgtgttcatttttgagacagcatttctctatgtaacagccctggtgtcttggaactagctctgtagaccaggctggcctcaaactcacagagatcctcctgcttctcccttcttttcttgtgctgttgaatagaaatagcctcagatctggtgaataatgagttgattactcaaaaacaaagttggaagcttgtttacatgtgctgatattggcatgcctgagcagccagacagctttttctgtgcaatgtaagtagggtcttctactgaaatccatttggaattatatatactctataggtctactttattattattttagattttacgtgtatgagtgttctgcttgtttgcatgtttgtgaatcatgtgtatgcctgttgggcaccaatgtcagaagagggtttgctaggatccctggaactggagttatagatggttatgagccacaatgtgggtgttggaaatcaaaccaggtcctctgtgagaacagaaagtgctcacattaaaaaatagtagttatagctgggcaggtggctcacacttgttagcactttaaaggcagaggcagaaagggattgcagctagttcaagactagcttgggctacacagtcagttcctgaccaacttggctagaaaacacatgtttttgttttgttttgttttgttttgtttttaagtaaacatctgagcttactatttaaacacacacacacatgagggcatagccgcattcaattcatagcaaataataaaacttttatcaataaaaacttatcaggtccttgtataatgaaaatgaaagttgacgaataaacatgaaagcccaagaaattagaataaggctggaagtgaaagtccaaggtaaatggaattataggggaaagtgatggtttgaatgttgatggtaattgaggagactacacatagaaaacatttaaggcaggcattggcataagtgaggatttgattgggaagactaactcactttagacaaatgggtggatggtgtctttatcagagtgctatgttcaaacatacccttaaattgacttttcatcctcaagatttcttatgccaggaattccttttagtgttggattttactaccagtggtaaaaatatgaaagtgggttttgtttttgttttgtttcgttttgtttcacacacacacacatacacacacacacacacacacacacacacacacacacaattgtttttttgttttgttttgtttttttggtttttcaagacagggtttctctgtgtagtcctggctgtcctggaactcactctgtagatcaggctggacttgaactcagaaatccgcctgcctctgcctcctgagtgctgggattaaaggcatgcgcatgcggcaccacaccctgctcacaattgtttttaaatatgtgtgtctgaggcattggccccctggagatggagtgacagaggcttgtgagctacctgacttaggtgcttgctagcaaactcaggtcctctcagcaagagcaacatgtgctgctaactgctgagctcttcttccacctttgttcttttgagacgcagtctcatgcagtacagctggctttgagtttgctccgtagccaacgctgaccttgcccttcctgcctccaccttccaagtgttgggttttccctatatttaatatttatttattccttggcaatttcatacatgcattcactcgtacttctcccccactccctacacatcccgaagctgtcttcctataaccttaatgaggtctccttttaaaataataataataatataataataataacaaccctgtgagtccagttagcagtgcttgctggaatgttggctaatcttgtcggaatcgtatgcaggtagccacagccgcagtacgcttgtgagggcggcagccagcattttcacagcttgcctccccatctttagctctcatgttctttccagccctgcttccacgatgttccatgggccttgggcagtgtgtgggttgctatagacaccttgtttggagctaagcatgcaattgttgctcagtctcaggccagctctgagtctgcattagctgctcctccttgcagaagaaacttctctggccaaggtcgaggagagtacagtattgatttgttcttgagatagagttttccagggtagccctggctggctcactatatagtatagcccaggctggtctcaaactcacagtgatcgacctgcctctgcttgccaagtgctgggattaaaagcacgtccctctctgcctggctcgacttattttttgacatggggactcactgcctggtgtccccctcctcctatagcctcaaaatggctgagcaagagtcaggtaacttgcttctctgccattcctgaagccctgtgttccatccggaacctgcataaaccaggtgaggggtgtgcttgtagtcacagcactgaggtcaaggcagaagtgtcagaaattcaaggtcatcctatctacaaagagaatttgagaccagcctgggctacaagaccctgtctcaaaacgtacaaacaagcaaacaaacaaaaaacaaattcaggagctgagagacggctcagtagttaagagcactgactgtacttctaaaggtcctgagttcaattcccagcaaccacatggtggcttacaaccgtctgtaatgggatctggtgccctcttctggtatatctgaagacagcaacagtgtactaatataaataaaataaataaacctttaaaaaaacaaaaaacaaattcaggggctccagaagagtagcaaatgttcttggtaaccactgagccatctttccagctctcctgtccttctttctttccttccttcctttctttttcttctcctctcccctcctctcctctcccctcccctcctcccctcccccctcctcctcctcctcctcctcttcttcttcctctctctctctctctctctctctctctctctctctctcctctttctttctttttttttttgagacagagtctcatgacattgcccaggatagacccaattcttcatcttcttgctctaaatctcccaagtgccgcggttacaggcccttgcctccaacaccagctggttcctaggttctagatagctattccaagtaggtagatgcgagggatatccaattatagtttgcttcatttccctagtgggaatagagaataaggccttgtttatttacttacttttaaaggctctcatgtagcccagcccagccttgaattctgatccatggtccaccacctccaggcttgcaatgcctactggcttttttcagacctgtagtcttttgttgttcggtgtgtatgtatgtatttatttagtgcattggtgttttgcctgaatgtaagtctgtatgagggtgtcagataccctggaactggacttacagacagttgtgagctgccatgtgggtgctgggaattgaaccacaaccacggtccggtccggaagagcagccagcattcttaaccaatgagccatttctccagcccctttgtttgtttgttttttagggaccagtaaattaattttaaacctagaaagccctcccttgtctacagaattcttttagttattctttctattggaactgagcttagggtgagtgcttggttagggtgagtgtttggttagagtgagtgcttggttagggtgcatgcttggttagggtgagtgtttggttagagtgagtgcttggttagggtgcatgctcggttagggtgagtgcttggttagggtgagtgcttggttagggtgagtgcttggttagggtgtgtgcttggttacagtgtgtgcttggttagggtgcatgcttggttagggtgagtgcttggttagggtgcatgcttagttagggtgagtgcttggttagggtgagtgcttggttagggtgagtgcttggttagggtgtgtgcttggttacagtgtgtgcttggttagggtgcatgcttggttagggtgagtgcttggttagggtgcatgcttagttagggtgagtgcttggttagggtgagtccttggttagggtgagtgcttggttagggtgagtccttggttagggtgagtgcttggttagggtgagtgcttggttagggtgtgtgcttggttagggtgtgtgcttggttagggtgtgtgcttggttagggtgagtgcttggttagggtgagtgcttggttagggtgcgtgcttggttagggtgcatgcttggttagggtgagtgcttgattagggtgagtgctgggttagggtgagtgcttggttagggtgagtgctcggttagggtgtgtgctcggttagggtgagtgctgggttagggtgagtgcttggttagggtgagtgcttggttacagtttgtgcttggttagggtgagtgcttggttacagtttgtgcttggttagggtgtgtgcttggttagggtgtgtgcttggttagggtgcatgcttggttagggtgagtgcttggttagggtgcatgcttagttagggtgagtgcttggttagggtgagtgcttggttagggtgagtgcttggttagggtgagtgcttggttagggtgagtgcttggttagggtgagtgcttggttagggtgagtgcttggttagggtgcatgcttggttagggtgagtgcttggttagggtgagtgcttgggtttccagcagtatgccagagacttccaagccagccaggactgcaatgtgagaccctgactcaaaaatgaaagaaaaacaaaagcaaaacaattgtctctgtgtgtgcttagtttaatcttatccactccaccttctctccctgataggagacaaatttggttcgagtaaagcacagaggaactaattaacctgagattacttgcagaatagcccttcctgacccttgaaggcgccatgttattacacgttgctgtctcttctatctacagctctatttcttcctcttctttattcttgtgccagcttcacctcactgtgccattgtgccgggagggcagttttaatggccacttgcctgccctctcctgaccttgcgcaaggacctgggttgaggggagggctttgggtgccgtgggctcctcgtgttcccaggccctgctgggcccaggtgcaacatggtggcttcccgccccggaatgggaggagtggactctgcctctgtcattctccagtcgggggaagtgctggctcaggctctgcaaccacagtgcagatgggagaggggccatgggacagaaaggcaaggaccctcagtgctagcagctgctggctttgtgacccatacccagcccagctcctgcctccctcttggatggcagggacagtctgggaacttctacctgatcctcacatctattctctctttccagaagcctcagaaggagtctccctgcccctgagtttccaaagctcctcacccagggggaataaggatgcccatgcatagcaagaacctgtcacttgcaggttgcctggaagacccgggcagctcacaactcatgccttggaccttaactgcctgtttctagttgaggaacccaggctgaggaaaccaagttatatcaccaagagcatttattctagcaaaccatgaaggggctcatgtgtgcctcttcaatacctatgaaaaatttataataaaaaatcctatttaaagccgggcgtggtggcgcacgcctttaatccccagcactccggaggcagaggcagacggatttctgagttcgaggccctggctgtccctctaccactgagccacatccttacttagcccagatcccgcctttgaagaatcgcagtgtttggcttctaaatgaccagggtgacagtcagacgagggagtccagtgctgctgacccgtgcagcgaccctagccatcagggcaaggatgctggcagccctcctcttgactctttttcgttcgttccttccttccttcttttgtgtgatgcgtattgtatatgaatgtggatggtgtgtgtacacgtttgtgggtgagggttgcacagagcataatggagtcagaggacaacttcaggtgtgcatctggccttccacgttgtttatgagagcatctctctctctctctctctctctttcttcctttctattttttaaaacattttgttttacataagtacactgttgctgacttcagacgcaccagaagagggcatcagatcccattacaggtggttgtgagccaccatatggttgctgggatttgaactcaggacctctggaagagcatccagtgctcttaacctgagccatcatctctccagctcagacaggtcttttgttttgtttttgttttttcgagacagggtttctctgtgtagccctggctgtcctggaactcactctgtagaccaggctggcctcgaactcagaaatccgcctgcctctgcctctggagtgctgggattaaaggcgtgcgccaccacgcccggctttaaatagggttttttattagaaatttttcataggtatatagaatgcattctgcttactcttccactttcaatttccctcccgccctggccagcaccccttattccttacaaaatgtctctgtcatatttgctagttttattttgtttagtgtttcatagttcaccccagacatagtttgggaactattaaatactcatcagtggatacgtttgagtgccctgtgtcccaatcctttagttgccagtaataaatggtaaggtttcatgggcttcttggagttgggccaatgctattttccaaagatgttaagatttaccataatagattcttgtacctgcctcactcacactcgcttgcagtacctgtctatctttctcttcttgccaatcacattgtagatgaggcttttgtggttttgttggctcctagtattagcataaggtgaactgatttcaggtaaaatgttgtggcttttctggcccattcattggatggaaacgaaggcccggttttgtgggagcacttctactggttagcaatggctaggcagagccatgtctaacagtacaaactctctcctgagagaattaatctttcctcctagacgcaattttgtcactttgaattttagaactatcagaggcccctttctctattcaaggacttcttgacagccatgttctttcttttcatttcatcttaccagtactcccacttttgagcctcaatattttgcttctcgtgatcttattagatttgtgttctcataatctttctcctgaacaacttaggctctaagttatgagacctcaaattacccaaggaactggctaggcctgcctggtggtgtaggcctttaatccgagcactcctgagtcagtagcagacagtgctctatggatttagggccagcctaatctacatggacttcaggctagccagatggccagggcaacataaccaatttcattacatagggaattaaaactgaggtatctggtatgataaaagggccactgagttagaaactatcatctgaaaagcaggcttagtggtacaagcctgtaattctaacacaggaggatcaggagctcagagtcattccggctacttagggacttggaggctagcctagttctggctccatgcaaaggaaaaggggaatgtggcagtggttaagataccataatagattcttgtacctgcctcactcacactcgcttgcagtacctgtctatctttctcttcttgccaatcacattgtagatgaggcttttgtggttttgttggctccttgtattagcataaggtgaactgatttaagagcactaactgctcttccaggggatctgaattacattccggctacacacaagatggcgtctgtaacttggtttccttgggatccgacaccctctgctggcctacacgggtataacacccaaacctaatgcatagacaaaactcatgcacattaaataaaatttaaggaaaatatcatatacagcacatgatgttttcaaaacaaagcattttatttaacagcaaactaccccacccactcaaccacccacccacccacccacccacccatccacccacccacacacggactcattgtgacatgttggtaagcaacagttttttttttcaagtcttcaaaacacccaagagtcaacagaagttctgtattccgcatccgttcacaaagtccaggtgttttccatgtgttttttcacagttggtgggaagatgactccagtctttcaacaacagattggtacacagttcatttatgtgatcaaagcagatgatggtaggatgtgcttaattggtagcaatattgatggcagtaactgtgaaaggaaggctttcagttattttttcctttgcaaattccagaaatgtaagcccattcctacccatacaaagggatattactgaatccagccaatttccactaattaaaagctaatattagtaacacttttgatgcccaattgagtttaatgaaaatgaaaaaaatttgtttgaactcccagacctcttcaacctggctccatcttctctgttccttttcttttgcctgaatgtcctgattgggttactaagtaaagtctagatactttgaaagtatgcgtatgctacaatgaataagcttccttacagcaaattgtgacttcagctctaaggcaacttggataaagagatcacattgacttaatctgtttcattcccatttgactcaaggcttagctgatagccatttagatgaaaatacattttcagaaacatttagcgaattaataccaattttgtggaactgcattaaagtcccaacttagattccagatagacaggctggaccctttccttcactcggcctcctgtcccaccctctgtgagtgaaagaaaaatggaaagggtcaaagcacaggcatttttaatctttttcaagttctttcaatttggtctttcgttcctccagttttctgattgttgtcaattttattattcttaaattttatgcaagaatgttaaacattaatgttattttcatccactggcattattttaccatagcaagccaccttgagtatattatagtaaggagaacatttctaaattactgtgagcattagcatgtaaaaaggtaaaaggtttaacgacacaggcaaaattggtcaatgtatttcaaagcctgctgcagctcaaaaatggcttgtttgccccaggataatgcaaagtagcctaagattgtgaacttagatggctgtcatccctcctgaccagtagtggtcacagtcatagctaaaatggcctagaaaattgagtttcttagcgtggagggcttctgtaactttagggtcaggcttgctacaaagcccagcttcccactcattgcagtggccggagaagacatgaggatgaggactcacattgcatattacttggggactaaggactaagtcgtgccactacccagaaaagagacccccccccccatccagcacttccctatgtctatgtttcctttttccatgtctcaggagccaagtgaaggcctaagagacatgcaaatccttgtagaacaggcgaaccaataaagcaaatgaatgaataataaccttcctgtattcaacctctgaggcaaactgtgggaaatgaggaaagtgttcttcagtctagaaaacgtttgagctaatatttctgtttaataaagagcatccctctgctttccggggcatctgtaagtcacactgagtgcccttttggaacaaatgtgttgcacttagcatccagtagcatcttctgcaatgtgtggaaccgaggaaatagagaacctcttttattatttccactctaccaagcatgcccatgaggaggggagcaactttttatttaacttgcctcctctacaccttgatgtttttcccagctaaagtgagagctgtagtctcaaggtgtgactgcagtcccctcagaaactactgaggtaaagtacactttgggttgcatcctttaaatgtctttgttcttttcagtacttagaaattttagtacttagaactgcactttcatcacacttaagttaaaagtatgagtgtgatagtatattcttcttgctcacatgacgctgagccaggcaatgaacaaatacgttagaattatcgattcatcttgattctcctttgaaacacttcaacagtaagaaaaggaaaatgggtaatgaattaaaggacagactttaagtctgtcctggcttcaagctaggccaatgagaaaatgacttttggagcttccttagctaggaagtctccagtttatgttgaaggaatcttggccttggttgggtttcgcaaacagccattatagttaaaatatttactcagaaggctggagagatgactcagtggttaagagtctgactgctcttccgaaggtcctgagttcaaatcccaacaaccacatgggggctcacaaccatctgtaatgtgatgtggtgccctcttctggtgtgtctgaagacagcaacagcgtactcatatacataaaatatataattctttaaaaatattattcactcagtaatcagatatattcttcaggctgggcatgggttaagcacatctgtaatctcagcacttgagaagctgtgacagtcaccaattagaaccagcctgggctttatgagaccatgtctcctatgatcagtgatctacactaggtccacctcacattttagttttaggacctaggttagcatatttatatacaatgtttcattaggtgttgtgttctgcatgcttggtccctccagccagtacatctagttcgagaggttctgggccacactgagtacatgccatcagatgctctggcctcttcccgttttgttccctgatacccatgctctgggattatctcactctggccctataaaactcctttactggcaaggtgtttgtaattcatctctggcagcagcattcaacaaacatttaggaactggatgggaaaaagttcctgtcattaataaaaccttttccacctcctcagtcaagccagctgggaagtatcctagacagcatagtccactcagtgtaacatttagcacactgccttgcacaaatccattttttttttctgttttcatttcctcattgaagtgaattgaagttttggtctagatttcactcctataagtgctacataatgctagaaagcaatctatgtgttcgctcaacacatagcatggtaaaattattattaggtggtgttaggtgataagcattatgattaagtttcagccattatgaaacttagaaagtaatcactgttcactgataaagccaacagttaggtcccggctttatagaactgtagacttcacaaagctccacacagatctgttgtgcatgcctgggataaaagcaaagtcattgcacaccaggcaaatattgcatatatacacatatatatggcagtttacaaattataaattaatctcatgcataatttctttagatacacaggacaatgagaatgctctttgcatcccagtgcctagcaagggcactgttttgtaataaatgactgccattcagtatgtactcatcaagtattgaatgcctcatatattcagtggttcacagttacttatttactttattttcacagtataataaatgtggcagaattttaaaagcctggaaattgataccaagtaagaaaatgaattgttacatttatatggtacctccgagttcataaaatgccaacgtacatattattctcaagtgtggacacactgaaatgtacgtctgtgtatctctccagtacccatgaaagagaatatacacatgggagacaatatttagcctccaggtttgagattgaccttatggtcttcccaggctagcctccaatttctgggctcaagtggtcctgttgcttcagctcagagcacatgctaccacacccagcttgttaactgtactcttcccattatgggctaaaaagtacaatgaaaattttgtagagactatgcctattttataggcagctttatttctatagaaaatttgtcttgtcttatactactgaactgctttatagttaagaaagtacccacaaccataatgtgacctgggcaaatgttcttgtattaacatgcccttatcactcaagttttgactgattaaattaagcattggctcattccttatgaatagtatggaatgcaaacattcttatttcatggcagttactcatgaatatttcatgtacccaaaacaatatcggatacatcagaggtagttagtagtcattcatttgcacacatggaacaattgatagctgtataatgctttatttaatgcattcttttgtaaattctagttctgtggtaatgtccccctttgttattcccagtgctgaacatgggtattcagaaattagaaggtgatcagaatagggtaatcaatcacctgcattagtgacctagtttgtagtttaaaatcagtttccatgtgttttctcttctgctacctggtataatataacttactgagcctcaccaaagcagaagaaacacactggccttaagtatatggactgttattcattcaagccccgttatgttcatatatttgtttttacaaagcatgttattcctagagcaatctttgtgcctatagcacacagaggcgtagactttagctactatgtaatacatactcagcactgacttggaagttacagtaggcttcatggtttacgtattcatacgtttcctggttacctggtaatatcttgttacctgggggtgaccacagtgaagcatcacagccttagtattcagcacaaaaaatatgcagggaaggaaattaatgttactcagacattccctggcattcatatcagggctt

What is claimed is:

1. A method for delaying differentiation of a stem cell, said method comprising introducing into said stem cell a transgene selected from the group consisting of an Xic transgene, a Tsix transgene, an Xite transgene, a Tsix/Xite transgene, and fragments thereof.

2. The method of claim 1, wherein said Xic transgene comprises a nucleic acid sequence substantially identical to a sequence selected from the group consisting of SEQ ID NOs: 1, 2, and 3.

3. The method of claim 1, wherein said Xic transgene comprises a nucleic acid sequence substantially identical to the human Xic sequence set forth in SEQ ID NO: 39.

4. The method of claim 1, wherein said Tsix transgene comprises a nucleic acid sequence substantially identical to a sequence selected from the group consisting of SEQ ID NOs: 5, 6, 9, 10, 12, 13, 14, 21, 22, 23, and 28-32.

5. The method of claim 4, wherein said Tsix transgene comprises the nucleic acid sequence of SEQ ID NOs: 9, 10, 12, 21, 22, or 28-32.

6. The method of claim 4, wherein said Tsix transgene comprises at least one copy of the sequence set forth in SEQ ID NOs: 13, 14, or 28-32.

7. The method of claim 6, wherein said Tsix transgene comprises at least two copies of the sequence set forth in SEQ ID NOs: 13, 14, or 28-32.

8. The method of claim 1, wherein said Tsix transgene comprises a nucleic acid sequence substantially identical to the human Tsix sequences set forth in SEQ ID NO: 36 or 40.

9. The method of claim 8, wherein said Tsix transgene comprises at least two copies of the sequence set forth in SEQ ID NO: 40.

10. The method of claim 1, wherein said Xite transgene comprises a nucleic acid sequence substantially identical to a sequence selected from the group consisting of SEQ ID NOs: 15, 16, 17, 24, 25, 26, and 27.

11. The method of claim 1, wherein said Xite transgene comprises a nucleic acid sequence substantially identical to the human Xite sequence set forth in SEQ ID NO: 38.

12. The method of claim 1, wherein said Tsix/Xite transgene comprises a nucleic acid sequence substantially identical to a sequence selected from the group consisting of SEQ ID NOs: 4, 11, and 19.

13. The method of claim 1, wherein said Tsix/Xite transgene comprises a nucleic acid sequence substantially identical to the human Tsix/Xite sequence set forth in SEQ ID NO: 37.

14. The method of claim 1, wherein said transgene can block endogenous X-X pairing.

15. The method of claim 1, wherein said stem cell is an embryonic stem cell.

16. The method of claim 15, wherein said embryonic stem cell is female or male.

17. The method of claim 15, wherein said embryonic stem cell is mammalian.

18. The method of claim 17, wherein said embryonic stem cell is human or mouse.

19. (canceled)

20. The method of claim 15, wherein said embryonic stem cell is a blastocyst stage stem cell, an embryonic germ cell, or a cloned stem cell from a somatic nuclei.

21. The method of claim 15, wherein said embryonic stem cell is from an agricultural animal.

22. A method for delaying differentiation of a stem cell, said method comprising introducing into said stem cell a small RNA substantially identical to or complementary to at least 15 nucleotides of a transgene selected from the group consisting of an Xic transgene, a Tsix transgene, an Xite transgene, a Tsix/Xite transgene, an Xist transgene, and fragments thereof.

23-31. (canceled)

32. A method of controlling differentiation of a stem cell, said method comprising
(a) introducing into said stem cell at least one transgene selected from the group consisting of an Xic transgene, a Tsix transgene, an Xite transgene, a Tsix/Xite transgene, and fragments thereof, thereby delaying differentiation of said stem cell; and
(b) when desired, inactivating the transgene, thereby allowing differentiation of said stem cell.

33-44. (canceled)

45. The method of claim 32, wherein the transgene further comprises a selectable marker.

46. The method of claim 32, wherein the transgene is flanked by recombinase recognition sequences.

47. (canceled)

48. The method of claim 32, wherein said inactivating comprises removing said transgene from said stem cell.

49. The method of claim 48, wherein said transgene is removed from said stem cell by expression in said stem cell of a recombinase.

50-52. (canceled)

53. The method of claim 32, wherein said stem cell is an embryonic stem cell.

54-59. (canceled)

60. A stem cell comprising one or more of the following: an Xic transgene substantially identical to a sequence selected from the group consisting of SEQ ID NOs: 1, 2, 3, 39, and fragments thereof; a Tsix transgene substantially identical to a sequence selected from the group consisting of SEQ ID NOs: 5, 6, 9, 10, 12, 13, 14, 21, 22, 23, 28-32, 36, 40, and fragments thereof; an Xite transgene substantially identical to a sequence selected from the group consisting of SEQ ID NOs: 15, 16, 17, 24, 25, 26, 27, 38, and fragments thereof; and Tsix/Xite transgene substantially identical to a sequence selected from the group consisting of SEQ ID NOs: 4, 11, 19, 37, and fragments thereof.

61-75. (canceled)

76. A isolated small RNA molecule comprising a nucleic acid sequence substantially identical to or complementary to at least 15 nucleotides of a transgene selected from the group consisting of an Xic transgene, a Tsix transgene, an Xite transgene, a Tsix/Xite transgene, an Xist transgene, and fragments thereof.

77-85. (canceled)

86. A composition comprising the isolated small RNA molecule of claim 76, formulated to facilitate entry of the small RNA molecule into a cell.

87. A pharmaceutical composition comprising the isolated small RNA molecule of claim 76.

88. A vector comprising the isolated small RNA of claim 76, wherein said small RNA is operably linked to one or more transcriptional regulatory sequences.
